(19) United States
(12) Patent Application Publication
(10) Pub. No.: US 2020/0308560 A1
(43) Pub. Date: Oct. 1, 2020

(54) NOVEL TYPE VI CRISPR ORTHOLOGS AND SYSTEMS

(71) Applicants: The Broad Institute, Inc., Cambridge, MA (US); Massachusetts Institute of Technology, Cambridge, MA (US); President and Fellows of Harvard College, Cambridge, MA (US)

(72) Inventors: Feng Zhang, Cambridge, MA (US); Omar O. Abudayyeh, Cambridge, MA (US); David Benjamin Turitz Cox, Cambridge, MA (US); Jonathan S. Gootenberg, Cambridge, MA (US)

(21) Appl. No.: 16/626,396

(22) PCT Filed: Jun. 26, 2018
(86) PCT No.: PCT/US2018/039595

§ 371 Date: Dec. 24, 2019

Related U.S. Application Data
(60) Provisional application No. 62/525,165, filed on Jun. 26, 2017.

(51) Int. Cl. C12N 9/22; C12N 15/64; C12Q 1/6841

(52) U.S. Cl. CPC C12N 9/22; C12N 15/64; C07K 2319/09; C12N 2310/20; C12Q 1/6841

(57) ABSTRACT

The invention provides for systems, methods, and compositions for targeting nucleic acids. In particular, the invention provides non-naturally occurring or engineered RNA-targeting systems comprising a novel RNA-targeting CRISPR effector protein and at least one targeting nucleic acid component like a guide RNA.

### CROSS-REFERENCE TO RELATED APPLICATIONS

[0001] This application claims the benefit of U.S. Provisional Application No. 62/566,851, filed Oct. 2, 2017; and U.S. Provisional Application No. 62/525,165, filed Jun. 26, 2017. The entire contents of the above-identified applications are hereby fully incorporated herein by reference.

### STATEMENT REGARDING FEDERALLY SPONSORED RESEARCH

[0002] This invention was made with government support under grant numbers MH100706 MH110049, and HL141201 awarded by the National Institutes of Health. The government has certain rights in the invention.

### TECHNICAL FIELD

[0003] The subject matter disclosed herein is generally directed to systems, methods and compositions used for the control of gene expression involving sequence targeting, such as perturbation of gene transcripts or nucleic acid editing, that may use vector systems related to Clustered Regularly Interspaced Short Palindromic Repeats (CRISPR) and components thereof.

### BACKGROUND

[0004] Recent advances in genome sequencing techniques and analysis methods have significantly accelerated the ability to catalog and map genetic factors associated with a diverse range of biological functions and diseases. Precise genome targeting technologies are needed to enable systematic reverse engineering of causal genetic variations by allowing selective perturbation of individual genetic elements, as well as to advance synthetic biology, biotechnological, and medical applications. Although genome-editing techniques such as designer zinc fingers, transcription activator-like effectors (TALEs), or homing meganucleases are available for producing targeted genome perturbations, there remains a need for new genome and transcriptome engineering technologies that employ novel strategies and molecular mechanisms and are affordable, easy to set up, scalable, and amenable to targeting multiple positions within the eukaryotic genome and transcriptome. This would provide a major resource for new applications in genome engineering and biotechnology.

[0005] The CRISPR-Cas systems of bacterial and archaeal adaptive immunity show extreme diversity of protein composition and genomic loci architecture. The CRISPR-Cas system loci has more than 50 gene families and there is no strictly universal genes indicating fast evolution and extreme diversity of loci architecture. So far, adopting a multi-pronged approach, there is comprehensive cas gene identification of about 395 profiles for 93 Cas proteins. Classification includes signature gene profiles plus signatures of locus architecture. A new classification of CRISPR-Cas systems is proposed in which these systems are broadly divided into two classes, Class 1 with multisubunit effector complexes and Class 2 with single-subunit effector modules exemplified by the Cas9 protein. Novel effector proteins associated with Class 2 CRISPR-Cas systems may be developed as powerful genome engineering tools and the prediction of putative novel effector proteins and their engineering and optimization is important.

[0006] The CRISPR-Cas adaptive immune system defends microbes against foreign genetic elements via DNA or RNA-DNA interference. Recently, the Class 2 type VI single-component CRISPR-Cas effector C2c2 (Shmakov et al. (2015) “Discovery and Functional Characterization of Diverse Class 2 CRISPR-Cas Systems”; Molecular Cell 60:1-13; doi: dx.doi.org/10.1016/j.molce1.2015.10.008) was characterized as an RNA-guided Rnase (Abudayyeh et al. (2016), Science, [Epub ahead of print], June 2; “C2c2 is a single-component programmable RNA-guided RNA-targeting CRISPR effector”; doi: 10.1126/science.aaf5573). It was demonstrated that C2c2 (e.g. from Leptotrichia shahii) that provides robust interference against RNA phage infection. Through in vitro biochemical analysis and in vivo assays, it was shown that C2c2 can be programmed to cleave ssRNA targets carrying protospacers flanked by a 3′ H (non-G) PAM. Cleavage is mediated by catalytic residues in the two conserved HEPN domains of C2c2, mutations in which generate a catalytically inactive RNA-binding protein. C2c2 is guided by a single guide and can be re-programmed to deplete specific mRNAs in vivo. It was shown that LshC2c2 can be targeted to a specific site of interest and can carry out non-specific RNase activity once primed with the cognate target RNA. These results broaden our understanding of CRISPR-Cas systems and demonstrate the possibility of harnessing C2c2 to develop a broad set of RNA-targeting tools.

[0007] C2c2 is now known as Cas13a. It will be understood that the term “C2c2” herein is used interchangeably with “Cas13a”.

[0008] Citation or identification of any document in this application is not an admission that such document is available as prior art to the present invention.

### SUMMARY OF THE INVENTION

[0009] There exists a pressing need for alternative and robust systems and techniques for targeting nucleic acids or polynucleotides (e.g. DNA or RNA or any hybrid or derivative thereof) with a wide array of applications, in particular in eukaryotic systems, more in particular in mammalian systems. This invention addresses this need and provides related advantages. Adding the novel RNA-targeting systems of the present application to the repertoire of genomic, transcriptomic, and epigenomic targeting technologies may transform the study and perturbation or editing of specific target sites through direct detection, analysis and manipulation, in particular in eukaryotic systems, more in particular in mammalian systems (including cells, organs, tissues, or organisms) and plant systems. To utilize the RNA-targeting systems of the present application effectively for RNA targeting without deleterious effects, it is critical to understand aspects of engineering and optimization of these RNA targeting tools.

[0010] The CRISPR-Cas13 family was discovered by computational mining of bacterial genomes for signatures of CRISPR systems (Shmakov, S. et al. Discovery and Functional Characterization of Diverse Class 2 CRISPR-Cas Systems. Mol Cell 60, 385-397, doi:10.1016/j.molce1.2015.10.008 (2015)), revealing the single-effector RNA-guided RNase Cas13a/C2c2 (Abudayyeh, O. O. et al. C2c2 is a single-component programmable RNA-guided RNA-targeting CRISPR effector. Science 353, aaf5573, doi:10.1126/science.aaf5573 (2016)) and later the single-effector RNA-guided RNase Cas13b (Shmakov, S. et al. Diversity and evolution of class 2 CRISPR-Cas systems. Nat Rev Microbiol 15, 169-182, doi:10.1038/nrmicro.2016.184 (2017); Smargon, A. A. et al. Cas13b is a Type VI-B CRISPR-Associated RNA-Guided RNase Differentially Regulated by Accessory Proteins Csx27 and Csx28. Mol Cell 65, 618-630 e617, doi:10.1016/j.molce1.2016.12.023 (2017)). The Class 2 type VI effector protein C2c2, also known as Cas13a, is a RNA-guided RNase that can be efficiently programmed to degrade ssRNA. C2c2 (Cas13a) achieves RNA cleavage through conserved basic residues within its two HEPN domains, in contrast to the catalytic mechanisms of other known RNases found in CRISPR-Cas systems. Mutation of the HEPN domain, such as (e.g. alanine) substitution, at any of the four predicted HEPN domain catalytic residues converted C2c2 into an inactive programmable RNA-binding protein (dC2c2, analogous to dCas9).

[0011] The programmability and specificity of the RNA-guided RNase Cas13 would make it an ideal platform for transcriptome manipulation. Applicants herein develop Cas13c for use as a mammalian transcript knockdown and binding tool. Cas13c is capable of robust RNA cleavage and binding with catalytically inactive versions using programmable guides.

[0012] The ability of dCas13c to bind to specified sequences could be used in several aspects according to the invention to (i) bring effector modules to specific transcripts to modulate the function or translation, which could be used for large-scale screening, construction of synthetic regulatory circuits and other purposes; (ii) fluorescently tag specific RNAs to visualize their trafficking and/or localization; (iii) alter RNA localization through domains with affinity for specific subcellular compartments; and (iv) capture specific transcripts (through direct pull down of dCas13c or use of dCas13c to localize biotin ligase activity to specific transcripts) to enrich for proximal molecular partners, including RNAs and proteins.

[0013] Active Cas13c should also have many applications. An aspect of the invention involves targeting a specific transcript for destruction, as with RFP here. In addition, Cas13c, once primed by the cognate target, may cleave other (non-complementary) RNA molecules in vitro and can inhibit cell growth in vivo. Biologically, such promiscuous RNase activity may reflect a programmed cell death/dormancy (PCD/D)-based protection mechanism of the type VI CRISPR-Cas systems. Accordingly, in an aspect of the invention, it might be used to trigger PCD or dormancy in specific cells—for example, cancer cells expressing a particular transcript, neurons of a given class, cells infected by a specific pathogen, or other aberrant cells or cells the presence of which is otherwise undesirable.

[0014] The invention provides a method of modifying nucleic acid sequences associated with or at a target locus of interest, in particular in eukaryotic cells, tissues, organs, or organisms, more in particular in mammalian cells, tissues, organs, or organisms, the method comprising delivering to said locus a non-naturally occurring or engineered composition comprising a Type VI CRISPR-Cas loci effector protein and one or more nucleic acid components, wherein the effector protein forms a complex with the one or more nucleic acid components and upon binding of the said complex to the locus of interest the effector protein induces the modification of the sequences associated with or at the target locus of interest. In a preferred embodiment, the modification is the introduction of a strand break. In a preferred embodiment, the sequences associated with or at the target locus of interest comprises RNA and the effector protein is encoded by a type VI CRISPR-Cas loci. The complex can be formed in vitro or ex vivo and introduced into a cell or contacted with RNA; or can be formed in vivo.

[0015] It will be appreciated that the terms Cas enzyme, CRISPR enzyme, CRISPR protein Cas protein and CRISPR Cas are generally used interchangeably and at all points of reference herein refer by analogy to novel CRISPR effector proteins further described in this application, unless otherwise apparent, such as by specific reference to Cas13. The CRISPR effector proteins described herein are preferably Cas13c effector proteins.

[0016] The invention provides a method of targeting (such as modifying) sequences associated with or at a target locus of interest, the method comprising delivering to said sequences associated with or at the locus a non-naturally occurring or engineered composition comprising a Cas13c loci effector protein (which may be catalytically active, or alternatively catalytically inactive) and one or more nucleic acid components, wherein the Cas13c effector protein forms a complex with the one or more nucleic acid components and upon binding of the said complex to the locus of interest the effector protein induces the modification of sequences associated with or at the target locus of interest. In a preferred embodiment, the modification is the introduction of a strand break. In a preferred embodiment the Cas13c effector protein forms a complex with one nucleic acid component; advantageously an engineered or non-naturally occurring nucleic acid component. The complex can be formed in vitro or ex vivo and introduced into a cell or contacted with RNA; or can be formed in vivo. The induction of modification of sequences associated with or at the target locus of interest can be Cas13c effector protein-nucleic acid guided. In a preferred embodiment the one nucleic acid component is a CRISPR RNA (crRNA). In a preferred embodiment the one nucleic acid component is a mature crRNA or guide RNA, wherein the mature crRNA or guide RNA comprises a spacer sequence (or guide sequence) and a direct repeat sequence or derivatives thereof. In a preferred embodiment the spacer sequence or the derivative thereof comprises a seed sequence, wherein the seed sequence is critical for recognition and/or hybridization to the sequence at the target locus.

[0017] Aspects of the invention relate to Cas13c effector protein complexes having one or more non-naturally occurring or engineered or modified or optimized nucleic acid components. In a preferred embodiment the nucleic acid component of the complex may comprise a guide sequence linked to a direct repeat sequence, wherein the direct repeat sequence comprises one or more stem loops or optimized secondary structures. In certain embodiments, the direct repeat has a minimum length of 16 nts, such as at least 28 nt, and a single stem loop. In further embodiments the direct repeat has a length longer than 16 nts, preferably more than 17 nts, such as at least 28 nt, and has more than one stem loop or optimized secondary structures. In particular embodiments, the direct repeat has 25 or more nts, such as 26 nt, 27 nt, 28 nt or more, and one or more stem loop structures. In a preferred embodiment the direct repeat may be modified to comprise one or more protein-binding RNA aptamers. In a preferred embodiment, one or more aptamers may be included such as part of optimized secondary structure. Such aptamers may be capable of binding a bacteriophage coat protein. The bacteriophage coat protein may be selected from the group comprising Qβ, F2, GA, fr, JP501, MS2, M12, R17, BZ13, JP34, JP500, KU1, M11, MX1, TW18, VK, SP, FI, ID2, NL95, TW19, AP205, ϕCb5, ϕCb8r, ϕCb12r, ϕCb23r, 7s and PRR1. In a preferred embodiment the bacteriophage coat protein is MS2. The invention also provides for the nucleic acid component of the complex being 30 or more, 40 or more or 50 or more nucleotides in length.

[0018] The invention provides cells comprising the type VI effector protein and/or guides and or complexes thereof with target nucleic acids. In certain embodiments, the cell is a eukaryotic cell, including but not limited to a yeast cell, a plant cell, a mammalian cell, an animal cell, or a human cell.

[0019] The invention also provides a method of modifying a target locus of interest, in particular in eukaryotic cells, tissues, organs, or organisms, more in particular in mammalian cells, tissues, organs, or organisms, the method comprising delivering to said locus a non-naturally occurring or engineered composition comprising a Cas13c loci effector protein and one or more nucleic acid components, wherein the Cas13c effector protein forms a complex with the one or more nucleic acid components and upon binding of the said complex to the locus of interest the effector protein induces the modification of the target locus of interest. In a preferred embodiment, the modification is the introduction of a strand break. The complex can be formed in vitro or ex vivo and introduced into a cell or contacted with RNA; or can be formed in vivo.

[0020] In such methods the target locus of interest may be comprised within an RNA moledule. Also, the target locus of interest may be comprised within a DNA molecule, and in certain embodiments, within a transcribed DNA molecule. In such methods the target locus of interest may be comprised in a nucleic acid molecule in vitro.

[0021] In such methods the target locus of interest may be comprised in a nucleic acid molecule within a cell, in particular a eukaryotic cell, such as a mammalian cell or a plant cell. The mammalian cell many be a non-human primate, bovine, porcine, rodent or mouse cell. The cell may be a non-mammalian eukaryotic cell such as poultry, fish or shrimp. The plant cell may be of a crop plant such as cassava, corn, sorghum, wheat, or rice. The plant cell may also be of an algae, tree or vegetable. The modification introduced to the cell by the present invention may be such that the cell and progeny of the cell are altered for improved production of biologic products such as an antibody, starch, alcohol or other desired cellular output. The modification introduced to the cell by the present invention may be such that the cell and progeny of the cell include an alteration that changes the biologic product produced.

[0022] The mammalian cell many be a non-human mammal, e.g., primate, bovine, ovine, porcine, canine, rodent, Leporidae such as monkey, cow, sheep, pig, dog, rabbit, rat or mouse cell. The cell may be a non-mammalian eukaryotic cell such as poultry bird (e.g., chicken), vertebrate fish (e.g., salmon) or shellfish (e.g., oyster, claim, lobster, shrimp) cell. The cell may also be a plant cell. The plant cell may be of a monocot or dicot or of a crop or grain plant such as cassava, corn, sorghum, soybean, wheat, oat or rice. The plant cell may also be of an algae, tree or production plant, fruit or vegetable (e.g., trees such as citrus trees, e.g., orange, grapefruit or lemon trees; peach or nectarine trees; apple or pear trees; nut trees such as almond or walnut or pistachio trees; nightshade plants; plants of the genus Brassica; plants of the genus Lactuca; plants of the genus Spinacia; plants of the genus Capsicum; cotton, tobacco, asparagus, carrot, cabbage, broccoli, cauliflower, tomato, eggplant, pepper, lettuce, spinach, strawberry, blueberry, raspberry, blackberry, grape, coffee, cocoa, etc).

[0023] The invention provides a method of modifying a target locus of interest, the method comprising delivering to said locus a non-naturally occurring or engineered composition comprising a Type VI CRISPR-Cas loci effector protein and one or more nucleic acid components, wherein the effector protein forms a complex with the one or more nucleic acid components and upon binding of the said complex to the locus of interest the effector protein induces the modification of the target locus of interest. In a preferred embodiment, the modification is the introduction of a strand break.

[0024] The invention also provides a method of modifying a target locus of interest, the method comprising delivering to said locus a non-naturally occurring or engineered composition comprising a Cas13c loci effector protein and one or more nucleic acid components, wherein the Cas13c effector protein forms a complex with the one or more nucleic acid components and upon binding of the said complex to the locus of interest the effector protein induces the modification of the target locus of interest. In a preferred embodiment, the modification is the introduction of a strand break.

[0025] In such methods the target locus of interest may be comprised in a nucleic acid molecule in vitro. In such methods the target locus of interest may be comprised in a nucleic acid molecule within a cell. Preferably, in such methods the target locus of interest may be comprised in a RNA molecule in vitro. Also preferably, in such methods the target locus of interest may be comprised in a RNA molecule within a cell. The cell may be a prokaryotic cell or a eukaryotic cell. The cell may be a mammalian cell. The cell may be a rodent cell. The cell may be a mouse cell.

[0026] In any of the described methods the target locus of interest may be a genomic or epigenomic locus of interest. In any of the described methods the complex may be delivered with multiple guides for multiplexed use. In any of the described methods more than one protein(s) may be used.

[0027] In further aspects of the invention the nucleic acid components may comprise a CRISPR RNA (crRNA) sequence. Without limitation, the Applicants hypothesize that in such instances, the pre-crRNA may comprise secondary structure that is sufficient for processing to yield the mature crRNA as well as crRNA loading onto the effector protein. By means of example and not limitation, such secondary structure may comprise, consist essentially of or consist of a stem loop within the pre-crRNA, more particularly within the direct repeat.

[0028] In any of the described methods the effector protein and nucleic acid components may be provided via one or more polynucleotide molecules encoding the protein and/or nucleic acid component(s), and wherein the one or more polynucleotide molecules are operably configured to express the protein and/or the nucleic acid component(s). The one or more polynucleotide molecules may comprise one or more regulatory elements operably configured to express the protein and/or the nucleic acid component(s). The one or more polynucleotide molecules may be comprised within one or more vectors. In any of the described methods the target locus of interest may be a genomic or epigenomic locus of interest. In any of the described methods the complex may be delivered with multiple guides for multiplexed use. In any of the described methods more than one protein(s) may be used.

[0029] Regulatory elements may comprise inducible promotors. Polynucleotides and/or vector systems may comprise inducible systems.

[0030] In any of the described methods the one or more polynucleotide molecules may be comprised in a delivery system, or the one or more vectors may be comprised in a delivery system.

[0031] In any of the described methods the non-naturally occurring or engineered composition may be delivered via liposomes, particles including nanoparticles, exosomes, microvesicles, a gene-gun or one or more viral vectors.

[0032] The invention also provides a non-naturally occurring or engineered composition which is a composition having the characteristics as discussed herein or defined in any of the herein described methods.

[0033] In certain embodiments, the invention thus provides a non-naturally occurring or engineered composition, such as particularly a composition capable of or configured to modify a target locus of interest, said composition comprising a Type VI CRISPR-Cas loci effector protein and one or more nucleic acid components, wherein the effector protein forms a complex with the one or more nucleic acid components and upon binding of the said complex to the locus of interest the effector protein induces the modification of the target locus of interest. In certain embodiments, the effector protein may be a Cas13c loci effector protein.

[0034] The invention also provides in a further aspect a non-naturally occurring or engineered composition, such as particularly a composition capable of or configured to modify a target locus of interest, said composition comprising: (a) a guide RNA molecule (or a combination of guide RNA molecules, e.g., a first guide RNA molecule and a second guide RNA molecule, such as for multiplexing) or a nucleic acid encoding the guide RNA molecule (or one or more nucleic acids encoding the combination of guide RNA molecules); (b) a Type VI CRISPR-Cas loci effector protein or a nucleic acid encoding the Type VI CRISPR-Cas loci effector protein. In certain embodiments, the effector protein may be a Cas13c loci effector protein.

[0035] The invention also provides in a further aspect a non-naturally occurring or engineered composition comprising: (a) a guide RNA molecule (or a combination of guide RNA molecules, e.g., a first guide RNA molecule and a second guide RNA molecule) or a nucleic acid encoding the guide RNA molecule (or one or more nucleic acids encoding the combination of guide RNA molecules); (b) be a Cas13c loci effector protein.

[0036] The invention also provides a vector system comprising one or more vectors, the one or more vectors comprising one or more polynucleotide molecules encoding components of a non-naturally occurring or engineered composition which is a composition having the characteristics as defined in any of the herein described methods.

[0037] The invention also provides a delivery system comprising one or more vectors or one or more polynucleotide molecules, the one or more vectors or polynucleotide molecules comprising one or more polynucleotide molecules encoding components of a non-naturally occurring or engineered composition which is a composition having the characteristics discussed herein or as defined in any of the herein described methods.

[0038] The invention also provides a non-naturally occurring or engineered composition, or one or more polynucleotides encoding components of said composition, or vector or delivery systems comprising one or more polynucleotides encoding components of said composition for use in a therapeutic method of treatment. The therapeutic method of treatment may comprise gene or transcriptome editing, or gene therapy.

[0039] The invention also provides for methods and compositions wherein one or more amino acid residues of the effector protein may be modified e.g., an engineered or non-naturally-occurring effector protein or Cas13c. In an embodiment, the modification may comprise mutation of one or more amino acid residues of the effector protein. The one or more mutations may be in one or more catalytically active domains of the effector protein. The effector protein may have reduced or abolished nuclease activity compared with an effector protein lacking said one or more mutations. The effector protein may not direct cleavage of the RNA strand at the target locus of interest. In a preferred embodiment, the one or more mutations may comprise two mutations. In a preferred embodiment the one or more amino acid residues are modified in a Cas13c effector protein, e.g., an engineered or non-naturally-occurring effector protein or Cas13c. In particular embodiments, the one or more modified or mutated amino acid residues are one or more of those in C2c2 corresponding to R597, H602, R1278 and H1283 (referenced to Lsh C2c2 amino acids), such as mutations R597A, H602A, R1278A and H1283A, or the corresponding amino acid residues in Lsh C2c2 orthologues.

[0040] In particular embodiments, the one or more modified of mutated amino acid residues are one or more of those in C2c2 corresponding to K2, K39, V40, E479, L514, V518, N524, G534, K535, E580, L597, V602, D630, F676, L709, 1713, R717 (HEPN), N718, H722 (HEPN), E773, P823, V828, 1879, Y880, F884, Y997, L1001, F1009, L1013, Y1093, L1099, L1111, Y1114, L1203, D1222, Y1244, L1250, L1253, K1261, 11334, L1355, L1359, R1362, Y1366, E1371, R1372, D1373, R1509 (HEPN), H1514 (HEPN), Y1543, D1544, K1546, K1548, V1551, 11558, according to C2c2 consensus numbering. In certain embodiments, the one or more modified of mutated amino acid residues are one or more of those in C2c2 corresponding to R717 and R1509. In certain embodiments, the one or more modified of mutated amino acid residues are one or more of those in C2c2 corresponding to K2, K39, K535, K1261, R1362, R1372, K1546 and K1548. In certain embodiments, said mutations result in a protein having an altered or modified activity. In certain embodiments, said mutations result in a protein having an increased activity, such as an increased specificity. In certain embodiments, said mutations result in a protein having a reduced activity, such as reduced specificity. In certain embodiments, said mutations result in a protein having no catalytic activity (i.e. “dead” C2c2). In an embodiment, said amino acid residues correspond to Lsh C2c2 amino acid residues, or the corresponding amino acid residues of a C2c2 protein from a different species.

[0041] In certain embodiments the one or more modified of mutated amino acid residues are one or more of those in C2c2 corresponding to M35, K36, T38, K39, 157, E65, G66, L68, N84, T86, E88, 1103, N105, E123, R128, R129, K139, L152, L194, N196, K198, N201, Y222, D253, 1266, F267, S280, 1303, N306, R331, Y338, K389, Y390, K391, 1434, K435, L458, D459, E462, L463, 1478, E479, K494, R495, N498, S501, E519, N524, Y529, V530, G534, K535, Y539, T549, D551, R577, E580, A581, F582, 1587, A593, L597, 1601, L602, E611, E613, D630, 1631, G633, K641, N646, V669, F676, S678, N695, E703, A707, 1709, 1713, 1716, R717, H722, F740, F742, K768, 1774, K778, 1783, L787, S789, V792, Y796, D799, F812, N818, P820, F821, V822, P823, S824, F825, Y829, K831, D837, L852, F858, E867, A871, L875, K877, Y880, Y881, F884, F888, F896, N901, V903, N915, K916, R918, Q920, E951, P956, Y959, Q964, 1969, N994, F1000, I10001, Q1003, F10005, K1007, G1008, F1009, N1019, L1020, K1021, 11023, N1028, E1070, 11075, K1076, F1092, K1097, L1099, L1104, L1107, K1113, Y1114, E1149, E1151, 11153, L1155, L1158, D1166, L1203, D1222, G1224, 11228, R1236, K1243, Y1244, G1245, D1255, K1261, S1263, L1267, E1269, K1274, 11277, E1278, L1289, H1290, A1294, N1320, K1325, E1327, Y1328, 11334, Y1337, K1341, N1342, K1343, N1350, L1352, L1355, L1356, 11359, L1360, R1362, V1363, G1364, Y1365, 11369, R1371, D1372, F1385, E1391, D1459, K1463, K1466, R1509, N1510, 11512, A1513, H1514, N1516, Y1517, L1529, L1530, E1534, L1536, R1537, Y1543, D1544, R1545, K1546, L1547, K1548, N1549, A1550, K1553, S1554, D1557, 11558, L1559, G1563, F1568, 11612, L1651, E1652, K1655, H1658, L1659, K1663, T1673, S1677, E1678, E1679, C1681, V1684, K1685, E1689 with reference to the consensus sequence as indicated in FIG. 3, i.e. based on the alignment of Leptotrichia wadei F0279 (“Lew2” or “Lw2”) and Listeria newyorkensis FSL M6-0635 (also known as Listeriaceae bacterium FSL M6-0635 (“Lib” or “LbFSL”)). As indicated earlier, in certain embodiments, in the above amino acid residue list, the residues corresponding to R597, H602, R1278 and H1283 (referenced to Lsh C2c2 amino acids) are excluded.

[0042] In certain embodiments, the one or more modified of mutated amino acid residues are one or more conserved charged amino acid residues. In certain embodiments, said amino acid residues may be mutated to alanine.

[0043] In certain embodiments the one or more modified of mutated amino acid residues are one or more of those in C2c2 corresponding to K28, K31, R44, E162, E184, K262, E288, K357, E360, K338, R441 (HEPN), H446 (HEPN), E471, K482, K525, K558, D707, R790, K811, R833, E839, R885, E894, R895, D896, K942, R960 (HEPN), H965 (HEPN), D990, K992, K994 with reference to the consensus sequence as indicated in FIG. 2, i.e. based on the alignment of the C2c2 orthologues as indicated in FIG. 1. As indicated earlier, in certain embodiments, in the above amino acid residue list, the residues corresponding to R597, H602, R1278 and H1283 (referenced to Lsh C2c2 amino acids) are excluded.

[0044] The invention also provides for the one or more mutations or the two or more mutations to be in a catalytically active domain of the effector protein. In certain embodiments, the one or more mutations or the two or more mutations may be in a catalytically active domain of the effector protein comprising a HEPN domain, or a catalytically active domain which is homologous to a HEPN domain. The effector protein may comprise one or more heterologous functional domains. The one or more heterologous functional domains may comprise one or more nuclear localization signal (NLS) domains. The one or more heterologous functional domains may comprise at least two or more NLS domains. The one or more NLS domain(s) may be positioned at or near or in proximity to a terminus of the effector protein (e.g., Cas13c) and if two or more NLSs, each of the two may be positioned at or near or in proximity to a terminus of the effector protein (e.g., Cas13c). The one or more heterologous functional domains may comprise one or more translational activation domains. In other embodiments the functional domain may comprise a transcriptional activation domain, for example VP64. The one or more heterologous functional domains may comprise one or more transcriptional repression domains. In certain embodiments the transcriptional repression domain comprises a KRAB domain or a SID domain (e.g. SID4X). The one or more heterologous functional domains may comprise one or more nuclease domains. In a preferred embodiment a nuclease domain comprises Fok1.

[0045] The invention also provides for the one or more heterologous functional domains to have one or more of the following activities: methylase activity, demethylase activity, translation activation activity, translation repression activity, transcription activation activity, transcription repression activity, transcription release factor activity, histone modification activity, nuclease activity, single-strand RNA cleavage activity, double-strand RNA cleavage activity, single-strand DNA cleavage activity, double-strand DNA cleavage activity and nucleic acid binding activity. In certain embodiments of the invention, the one or more heterologous functional domains may comprise epitope tags or reporters. Non-limiting examples of epitope tags include histidine (His) tags, V5 tags, FLAG tags, influenza hemagglutinin (HA) tags, Myc tags, VSV-G tags, and thioredoxin (Trx) tags. Examples of reporters include, but are not limited to, glutathione-S-transferase (GST), horseradish peroxidase (HRP), chloramphenicol acetyltransferase (CAT) beta-galactosidase, beta-glucuronidase, luciferase, green fluorescent protein (GFP), HcRed, DsRed, cyan fluorescent protein (CFP), yellow fluorescent protein (YFP), and autofluorescent proteins including blue fluorescent protein (BFP).

[0046] At least one or more heterologous functional domains may be at or near the amino-terminus of the effector protein and/or wherein at least one or more heterologous functional domains is at or near the carboxy-terminus of the effector protein. The one or more heterologous functional domains may be fused to the effector protein. The one or more heterologous functional domains may be tethered to the effector protein. The one or more heterologous functional domains may be linked to the effector protein by a linker moiety.

[0047] The invention also provides for the effector protein comprising an effector protein from an organism from a genus comprising Streptococcus, Campylobacter, Nitratifractor, Staphylococcus, Parvibaculum, Roseburia, Neisseria, Gluconacetobacter, Azospirillum, Sphaerochaeta, Lactobacillus, Eubacterium, Corynebacter, Carnobacterium, Rhodobacter, Listeria, Paludibacter, Clostridium, Lachnospiraceae, Clostridiaridium, Leptotrichia, Francisella, Legionella, Alicyclobacillus, Methanomethyophilus, Porphyromonas, Prevotella, Bacteroidetes, Helcococcus, Letospira, Desulfovibrio, Desulfonatronum, Opitutaceae, Tuberibacillus, Bacillus, Brevibacilus, Methylobacterium or Acidaminococcus. The effector protein may comprise a chimeric effector protein comprising a first fragment from a first effector protein ortholog and a second fragment from a second effector protein ortholog, and wherein the first and second effector protein orthologs are different. At least one of the first and second effector protein orthologs may comprise an effector protein from an organism comprising Streptococcus, Campylobacter, Nitratifractor, Staphylococcus, Parvibaculum, Roseburia, Neisseria, Gluconacetobacter, Azospirillum, Sphaerochaeta, Lactobacillus, Eubacterium, Corynebacter, Carnobacterium, Rhodobacter, Listeria, Paludibacter, Clostridium, Lachnospiraceae, Clostridiaridium, Leptotrichia, Francisella, Legionella, Alicyclobacillus, Methanomethyophilus, Porphyromonas, Prevotella, Bacteroidetes, Helcococcus, Letospira, Desulfovibrio, Desulfonatronum, Opitutaceae, Tuberibacillus, Bacillus, Brevibacilus, Methylobacterium or Acidaminococcus.

[0048] In certain embodiments, the effector protein, particularly a Type VI loci effector protein, more particularly a Cas13c protein (Cas13cp), may originate from, may be isolated from, or may be derived from a bacterial species belonging to the taxa alpha-proteobacteria, Bacilli, Clostridia, Fusobacteria and Bacteroidetes. In certain embodiments, the effector protein, particularly a Type VI loci effector protein, more particularly a Cas13cp, may originate from, may be isolated from, or may be derived from a bacterial species belonging to a genus selected from the group consisting of Lachnospiraceae, Clostridium, Carnobacterium, Paludibacter, Listeria, Leptotrichia, and Rhodobacter. In certain embodiments, the effector protein, particularly a Type VI loci effector protein, more particularly a Cas13cp may originate from, may be isolated from or may be derived from a bacterial species selected from the group consisting of Lachnospiraceae bacterium MA2020, Lachnospiraceae bacterium NK4A179, Clostridium aminophilum (e.g., DSM 10710), Lachnospiraceae bacterium NK4A144, Carnobacterium gallinarum (e.g., DSM 4847 strain MT44), Paludibacter propionicigenes (e.g., WB4), Listeria seeligeri (e.g., serovar ½b str. SLCC3954), Listeria weihenstephanensis (e.g., FSL R9-0317 c4), Listeria newyorkensis (e.g., strain FSL M6-0635: also “LbFSL”), Leptotrichia wadei (e.g., F0279: also “Lw” or “Lw2”), Leptotrichia buccalis (e.g., DSM 1135), Leptotrichia sp. Oral taxon 225 (e.g., str. F0581), Leptotrichia sp. Oral taxon 879 (e.g., strain F0557), Leptotrichia shahii (e.g., DSM 19757), Rhodobacter capsulatus (e.g., SB 1003, R121, or DE442). In certain preferred embodiments, the Cas13c effector protein originates from Listeriaceae bacterium (e.g. FSL M6-0635: also “LbF SL”), Lachnospiraceae bacterium MA2020, Lachnospiraceae bacterium NK4A179, Clostridium aminophilum (e.g., DSM 10710), Carnobacterium gallinarum (e.g., DSM 4847), Paludibacter propionicigenes (e.g., WB4), Listeria seeligeri (e.g., serovar ½b str. SLCC3954), Listeria weihenstephanensis (e.g., FSL R9-0317 c4), Leptotrichia wadei (e.g., F0279: also “Lw” or “Lw2”), Leptotrichia shahii (e.g., DSM 19757), Rhodobacter capsulatus (e.g., SB 1003, R121, or DE442); preferably Listeriaceae bacterium FSL M6-0635 (i.e. Listeria newyorkensis FSL M6-0635: “LbFSL” in FIG. 4-7) or Leptotrichia wadei F0279 (also “Lw” or “Lw 2”).

[0049] In certain embodiments, a Type VI locus as intended herein may encode Cas1, Cas2, and the Cas13cp effector protein.

[0050] In certain embodiments, the effector protein, particularly a Type VI loci effector protein, more particularly a Cas13cp, such as a native Cas13cp, may be about 1000 to about 1500 amino acids long, such as about 1100 to about 1400 amino acids long, e.g., about 1000 to about 1100, about 1100 to about 1200 amino acids long, or about 1200 to about 1300 amino acids long, or about 1300 to about 1400 amino acids long, or about 1400 to about 1500 amino acids long, e.g., about 1000, about 1100, about 1200, about 1300, about 1400 or about 1500 amino acids long.

[0051] In certain embodiments, the effector protein, particularly a Type VI loci effector protein, more particularly a Cas13cp, comprises at least one and preferably at least two, such as more preferably exactly two, conserved RxxxxH motifs. Catalytic RxxxxH motifs are characteristic of HEPN (Higher Eukaryotes and Prokaryotes Nucleotide-binding) domains. Hence, in certain embodiments, the effector protein, particularly a Type VI loci effector protein, more particularly a Cas13cp, comprises at least one and preferably at least two, such as more preferably exactly two, HEPN domains. In certain embodiments, the HEPN domains may possess RNAse activity. In other embodiments, the HEPN domains may possess DNAse activity.

[0052] In certain embodiments, Type VI loci as intended herein may comprise CRISPR repeats between 30 and 40 bp long, more typically between 35 and 39 bp long, e.g., 30, 31, 32, 33, 34, 35, 36, 37, 38, 39, or 40 bp long. In particular embodiments, the direct repeat is at least 25 nt long.

[0053] In certain embodiments, a protospacer adjacent motif (PAM) or PAM-like motif directs binding of the effector protein complex as disclosed herein to the target locus of interest. In some embodiments, the PAM may be a 5′ PAM (i.e., located upstream of the 5′ end of the protospacer). In other embodiments, the PAM may be a 3′ PAM (i.e., located downstream of the 5′ end of the protospacer). The term “PAM” may be used interchangeably with the term “PFS” or “protospacer flanking site” or “protospacer flanking sequence”.

[0054] In certain embodiments, the CRISPR enzyme is engineered and can comprise one or more mutations that reduce or eliminate a nuclease activity. Mutations can also be made at neighboring residues, e.g., at amino acids near those indicated above that participate in the nuclease activity. In some embodiments, only one HEPN domain is inactivated, and in other embodiments, a second HEPN domain is inactivated.

[0055] In certain embodiments of the invention, the guide RNA or mature crRNA comprises, consists essentially of, or consists of a direct repeat sequence and a guide sequence or spacer sequence. In certain embodiments, the guide RNA or mature crRNA comprises, consists essentially of, or consists of a direct repeat sequence linked to a guide sequence or spacer sequence. In certain embodiments the guide RNA or mature crRNA comprises 19 nts of partial direct repeat followed by 18, 19, 20, 21, 22, 23, 24, 25, or more nt of guide sequence, such as 18-25, 19-25, 20-25, 21-25, 22-25, or 23-25 nt of guide sequence or spacer sequence. In certain embodiments, the effector protein is a Cas13c effector protein and requires at least 16 nt of guide sequence to achieve detectable DNA cleavage and a minimum of 17 nt of guide sequence to achieve efficient DNA cleavage in vitro. In particular embodiments, the effector protein is a Cas13c protein and requires at least 19 nt of guide sequence to achieve detectable RNA cleavage. In certain embodiments, the direct repeat sequence is located upstream (i.e., 5′) from the guide sequence or spacer sequence. In a preferred embodiment the seed sequence (i.e. the sequence essential critical for recognition and/or hybridization to the sequence at the target locus) of the Cas13c guide RNA is approximately within the first 5 nt on the 5′ end of the guide sequence or spacer sequence.

[0056] In preferred embodiments of the invention, the mature crRNA comprises a stem loop or an optimized stem loop structure or an optimized secondary structure. In preferred embodiments the mature crRNA comprises a stem loop or an optimized stem loop structure in the direct repeat sequence, wherein the stem loop or optimized stem loop structure is important for cleavage activity. In certain embodiments, the mature crRNA preferably comprises a single stem loop. In certain embodiments, the direct repeat sequence preferably comprises a single stem loop. In certain embodiments, the cleavage activity of the effector protein complex is modified by introducing mutations that affect the stem loop RNA duplex structure. In preferred embodiments, mutations which maintain the RNA duplex of the stem loop may be introduced, whereby the cleavage activity of the effector protein complex is maintained. In other preferred embodiments, mutations which disrupt the RNA duplex structure of the stem loop may be introduced, whereby the cleavage activity of the effector protein complex is completely abolished.

[0057] In particular embodiments, the mature crRNA comprises a stem loop or an optimized stem loop structure. In particular embodiments, the direct repeat of the crRNA comprises at least 25 nucleotides comprising a stem loop. In particular embodiments, the the stem is amenable to individual base swaps but activity is disrupted by most secondary structure changes or truncation of the crRNA. Examples of disrupting mutations include swapplng of more than two of the stem nucleotides, addition of a non-pairing nucleotide in the stem, shortening of the stem (by removal of one of the pairing nucleotides) or extending the stem (by addition of one set of pairing nucleotides). However, the crRNA may be amenable to 5′ and/or 3′ extensions to include non-functional RNA sequences as envisaged for particular applications described herein.

[0058] The invention also provides for the nucleotide sequence encoding the effector protein being codon optimized for expression in a eukaryote or eukaryotic cell in any of the herein described methods or compositions. In an embodiment of the invention, the codon optimized nucleotide sequence encoding the effector protein encodes any Cas13c discussed herein and is codon optimized for operability in a eukaryotic cell or organism, e.g., such cell or organism as elsewhere herein mentioned, for instance, without limitation, a yeast cell, or a mammalian cell or organism, including a mouse cell, a rat cell, and a human cell or non-human eukaryote organism, e.g., plant.

[0059] In certain embodiments of the invention, at least one nuclear localization signal (NLS) is attached to the nucleic acid sequences encoding the Cas13c effector proteins. In preferred embodiments at least one or more C-terminal or N-terminal NLSs are attached (and hence nucleic acid molecule(s) coding for the Cas13c effector protein can include coding for NLS(s) so that the expressed product has the NLS(s) attached or connected). In certain embodiments of the invention, at least one nuclear export signal (NES) is attached to the nucleic acid sequences encoding the Cas13c effector proteins. In preferred embodiments at least one or more C-terminal or N-terminal NESs are attached (and hence nucleic acid molecule(s) coding for the Cas13c effector protein can include coding for NES(s) so that the expressed product has the NES(s) attached or connected). In a preferred embodiment a C-terminal and/or N-terminal NLS or NES is attached for optimal expression and nuclear targeting in eukaryotic cells, preferably human cells. In a preferred embodiment, the codon optimized effector protein is Cas13c and the spacer length of the guide RNA is from 15 to 35 nt. In certain embodiments, the spacer length of the guide RNA is at least 16 nucleotides, such as at least 17 nucleotides, preferably at least 18 nt, such as preferably at least 19 nt, at least 20 nt, at least 21 nt, or at least 22 nt. In certain embodiments, the spacer length is from 15 to 17 nt, from 17 to 20 nt, from 20 to 24 nt, eg. 20, 21, 22, 23, or 24 nt, from 23 to 25 nt, e.g., 23, 24, or 25 nt, from 24 to 27 nt, from 27-30 nt, from 30-35 nt, or 35 nt or longer. In certain embodiments of the invention, the codon optimized effector protein is Cas13c and the direct repeat length of the guide RNA is at least 16 nucleotides. In certain embodiments, the codon optimized effector protein is Cas13c and the direct repeat length of the guide RNA is from 16 to 20 nt, e.g., 16, 17, 18, 19, or 20 nucleotides. In certain preferred embodiments, the direct repeat length of the guide RNA is 19 nucleotides.

[0060] The invention also encompasses methods for delivering multiple nucleic acid components, wherein each nucleic acid component is specific for a different target locus of interest thereby modifying multiple target loci of interest. The nucleic acid component of the complex may comprise one or more protein-binding RNA aptamers. The one or more aptamers may be capable of binding a bacteriophage coat protein. The bacteriophage coat protein may be selected from the group comprising Qβ, F2, GA, fr, JP501, MS2, M12, R17, BZ13, JP34, JP500, KU1, M11, MX1, TW18, VK, SP, FI, ID2, NL95, TW19, AP205, ϕCb5, ϕCb8r, ϕCb12r, ϕCb23r, 7s and PRR1. In a preferred embodiment the bacteriophage coat protein is MS2. The invention also provides for the nucleic acid component of the complex being 30 or more, 40 or more or 50 or more nucleotides in length.

[0061] Accordingly, it is an object of the invention not to encompass within the invention any previously known product, process of making the product, or method of using the product such that Applicants reserve the right and hereby disclose a disclaimer of any previously known product, process, or method. It is further noted that the invention does not intend to encompass within the scope of the invention any product, process, or making of the product or method of using the product, which does not meet the written description and enablement requirements of the USPTO (35 U.S.C. § 112, first paragraph) or the EPO (Article 83 of the EPC), such that Applicants reserve the right and hereby disclose a disclaimer of any previously described product, process of making the product, or method of using the product. It may be advantageous in the practice of the invention to be in compliance with Art. 53(c) EPC and Rule 28(b) and (c) EPC. Nothing herein is to be construed as a promise.

[0062] It is noted that in this disclosure and particularly in the claims and/or paragraphs, terms such as “comprises”, “comprised”, “comprising” and the like can have the meaning attributed to it in U.S. Patent law; e.g., they can mean “includes”, “included”, “including”, and the like; and that terms such as “consisting essentially of” and “consists essentially of” have the meaning ascribed to them in U.S. Patent law, e.g., they allow for elements not explicitly recited, but exclude elements that are found in the prior art or that affect a basic or novel characteristic of the invention.

[0063] In a further aspect, the invention provides a eukaryotic cell comprising a nucleotide sequence encoding the CRISPR system described herein which ensures the generation of a modified target locus of interest, wherein the target locus of interest is modified according to in any of the herein described methods. A further aspect provides a cell line of said cell. Another aspect provides a multicellular organism comprising one or more said cells.

[0064] In certain embodiments, the modification of the target locus of interest may result in: the eukaryotic cell comprising altered (protein) expression of at least one gene product; the eukaryotic cell comprising altered (protein) expression of at least one gene product, wherein the (protein) expression of the at least one gene product is increased; the eukaryotic cell comprising altered (protein) expression of at least one gene product, wherein the (protein) expression of the at least one gene product is decreased; or the eukaryotic cell comprising an edited transcriptome.

[0065] In certain embodiments, the eukaryotic cell may be a mammalian cell or a human cell.

[0066] In further embodiments, the non-naturally occurring or engineered compositions, the vector systems, or the delivery systems as described in the present specification may be used for RNA sequence-specific interference, RNA sequence specific modulation of expression (inluding isoform specific expression), stability, localization, functionality (e.g. ribosomal RNAs or miRNAs), etc.; or multiplexing of such processes.

[0067] In further embodiments, the the non-naturally occurring or engineered compositions, the vector systems, or the delivery systems as described in the present specification may be used for RNA detection and/or quantification in a sample, such as a biological sample. In certain embodiments, RNA detection is in a cell. In an embodiment, the invention provides a method of detecting a target RNA in a sample, comprising (a) incubating the sample with i) a Type VI CRISPR-Cas effector protein capable of cleaving RNA, ii) a guide RNA capable of hybridizing to the target RNA, and iii) an RNA-based cleavage inducible reporter capable of being non-specifically and detectably cleaved by the effector protein, (b) detecting said target RNA based on the signal generated by cleavage of said RNA-based cleavage inducible reporter.

[0068] In an embodiment the Type VI CRISPR-Cas effector protein comprises a Cas13a effector protein. In an embodiment the Type VI CRISPR-Cas effector protein comprises a Cas13b effector protein. In an embodiment the Type VI CRISPR-Cas effector protein comprises a Cas13c effector protein. In an embodiment, the RNA-based cleavage inducible reporter construct comprises a fluorochrome and a quencher. In certain embodiments, the sample comprises a cell-free biological sample. In other embodiments, the sample comprises or a cellular sample, for example, without limitation a plant cell, or an animal cell. In an embodiment of the invention, the target RNA comprises a pathogen RNA, including, but not limited to a target RNA from a virus, bacteria, fungus, or parasite. In an embodiment, the guide RNA is designed to detect a target RNA which comprises a single nucleotide polymorphism or a splice variant of an RNA transcript. In an embodiment, the guide RNA comprises one or more mismatched nucleotides with the target RNA. In certain embodiments, the guide RNA hybridizes to a target molecule that is diagnostic for a disease state, such as, but not limited to, cancer, or an immune disease.

[0069] The invention provides a ribonucleic acid (RNA) detection system, comprising a) a Type VI CRISPR-Cas effector protein capable of cleaving RNA, b) a guide RNA capable of binding to a target RNA, and c) an RNA-based cleavage inducible reporter capable of being non-specifically and detectably cleaved by the effector protein. Further, the invention provides a kit for RNA detection, which comprises a) a Type VI CRISPR-Cas effector protein capable of cleaving RNA, and b) an RNA-based cleavage inducible reporter capable of being non-specifically and detectably cleaved by the effector protein. In certain embodiments, the RNA-based cleavage inducible reporter construct comprises a fluorochrome and a quencher.

[0070] In further embodiments, the the non-naturally occurring or engineered compositions, the vector systems, or the delivery systems as described in the present specification may be used for generating disease models and/or screening systems.

[0071] In further embodiments, the non-naturally occurring or engineered compositions, the vector systems, or the delivery systems as described in the present specification may be used for: site-specific transcriptome editing or purturbation; nucleic acid sequence-specific interference; or multiplexed genome engineering.

[0072] Also provided is a gene product from the cell, the cell line, or the organism as described herein. In certain embodiments, the amount of gene product expressed may be greater than or less than the amount of gene product from a cell that does not have altered expression or edited genome. In certain embodiments, the gene product may be altered in comparison with the gene product from a cell that does not have altered expression or edited genome.

[0073] These and other aspects, objects, features, and advantages of the example embodiments will become apparent to those having ordinary skill in the art upon consideration of the following detailed description of illustrated example embodiments.

### BRIEF DESCRIPTION OF THE DRAWINGS

[0074] An understanding of the features and advantages of the present invention will be obtained by reference to the following detailed description that sets forth illustrative embodiments, in which the principles of the invention may be utilized, and the accompanying drawings of which:

[0075] FIG. 1—Comparison of Cas13a, Cas13b, and Cas13c orthologues. (A) HEK293 cells were transfected with different Cas13 orthologues and Cas13 expression was characterized by fluorescence readout.

[0076] FIG. 2A-2B—Transcript knockdown by Cas13 orthologs. Various Cas13a, Cas13b, Cas13c orthologs were compared in as to knockdown of luciferase reporter gene expression in two experiments using two different guide nucleic acids, guide 1 (A) and guide 2 (B).

[0077] FIG. 3—Characterization of Cas13 orthologs. Various Cas13a, Cas13b, and Cas13c orthologs were compared as to knockdown of a luciferase reporter gene by two different guide nucleic acids. The Figure further highlights Cas13 orthologs that consistently knocked down gene expression across different guide nucleic acids.

[0078] FIG. 4A-4B—RNA binding by truncations of dCas13b. Various N-terminal and C-terminal truncations of dCas13b are depicted. RNA binding is indicated where there is ADAR-dependent RNA editing as measured by restoration of luciferase signal, comparing activity using targeting and non-targeting guides. Amino acid positions correspond to amino acid positions of Prevotella sp. P5-125 Cas13b protein.

[0079] The figures herein are for illustrative purposes only and are not necessarily drawn to scale.

### DETAILED DESCRIPTION OF THE EXAMPLE EMBODIMENTS

[0080] General Definitions

[0081] Unless defined otherwise, technical and scientific terms used herein have the same meaning as commonly understood by one of ordinary skill in the art to which this disclosure pertains. Definitions of common terms and techniques in molecular biology may be found in Molecular Cloning: A Laboratory Manual, 2^{nd} edition (1989) (Sambrook, Fritsch, and Maniatis); Molecular Cloning: A Laboratory Manual, 4^{th} edition (2012) (Green and Sambrook); Current Protocols in Molecular Biology (1987) (F. M. Ausubel et al. eds.); the series Methods in Enzymology (Academic Press, Inc.): PCR 2: A Practical Approach (1995) (M. J. MacPherson, B. D. Hames, and G. R. Taylor eds.): Antibodies, A Laboraotry Manual (1988) (Harlow and Lane, eds.): Antibodies A Laboraotry Manual, 2nd edition 2013 (E. A. Greenfield ed.); Animal Cell Culture (1987) (R. I. Freshney, ed.); Benjamin Lewin, Genes IX, published by Jones and Bartlet, 2008 (ISBN 0763752223); Kendrew et al. (eds.), The Encyclopedia of Molecular Biology, published by Blackwell Science Ltd., 1994 (ISBN 0632021829); Robert A. Meyers (ed.), Molecular Biology and Biotechnology: a Comprehensive Desk Reference, published by VCH Publishers, Inc., 1995 (ISBN 9780471185710); Singleton et al., Dictionary of Microbiology and Molecular Biology 2nd ed., J. Wiley & Sons (New York, N.Y. 1994), March, Advanced Organic Chemistry Reactions, Mechanisms and Structure 4th ed., John Wiley & Sons (New York, N.Y. 1992); and Marten H. Hofker and Jan van Deursen, Transgenic Mouse Methods and Protocols, 2^{nd} edition (2011).

[0082] As used herein, the singular forms “a”, “an”, and “the” include both singular and plural referents unless the context clearly dictates otherwise.

[0083] The term “optional” or “optionally” means that the subsequent described event, circumstance or substituent may or may not occur, and that the description includes instances where the event or circumstance occurs and instances where it does not.

[0084] The recitation of numerical ranges by endpoints includes all numbers and fractions subsumed within the respective ranges, as well as the recited endpoints.

[0085] The terms “about” or “approximately” as used herein when referring to a measurable value such as a parameter, an amount, a temporal duration, and the like, are meant to encompass variations of and from the specified value, such as variations of +1-10% or less, +/−5% or less, +/−1% or less, and +/−0.1% or less of and from the specified value, insofar such variations are appropriate to perform in the disclosed invention. It is to be understood that the value to which the modifier “about” or “approximately” refers is itself also specifically, and preferably, disclosed.

[0086] As used herein, a “biological sample” may contain whole cells and/or live cells and/or cell debris. The biological sample may contain (or be derived from) a “bodily fluid”. The present invention encompasses embodiments wherein the bodily fluid is selected from amniotic fluid, aqueous humour, vitreous humour, bile, blood serum, breast milk, cerebrospinal fluid, cerumen (earwax), chyle, chyme, endolymph, perilymph, exudates, feces, female ejaculate, gastric acid, gastric juice, lymph, mucus (including nasal drainage and phlegm), pericardial fluid, peritoneal fluid, pleural fluid, pus, rheum, saliva, sebum (skin oil), semen, sputum, synovial fluid, sweat, tears, urine, vaginal secretion, vomit and mixtures of one or more thereof. Biological samples include cell cultures, bodily fluids, cell cultures from bodily fluids. Bodily fluids may be obtained from a mammal organism, for example by puncture, or other collecting or sampling procedures.

[0087] The terms “subject,” “individual,” and “patient” are used interchangeably herein to refer to a vertebrate, preferably a mammal, more preferably a human. Mammals include, but are not limited to, murines, simians, humans, farm animals, sport animals, and pets. Tissues, cells and their progeny of a biological entity obtained in vivo or cultured in vitro are also encompassed.

[0088] Various embodiments are described hereinafter. It should be noted that the specific embodiments are not intended as an exhaustive description or as a limitation to the broader aspects discussed herein. One aspect described in conjunction with a particular embodiment is not necessarily limited to that embodiment and can be practiced with any other embodiment(s). Reference throughout this specification to “one embodiment”, “an embodiment,” “an example embodiment,” means that a particular feature, structure or characteristic described in connection with the embodiment is included in at least one embodiment of the present invention. Thus, appearances of the phrases “in one embodiment,” “in an embodiment,” or “an example embodiment” in various places throughout this specification are not necessarily all referring to the same embodiment, but may. Furthermore, the particular features, structures or characteristics may be combined in any suitable manner, as would be apparent to a person skilled in the art from this disclosure, in one or more embodiments. Furthermore, while some embodiments described herein include some but not other features included in other embodiments, combinations of features of different embodiments are meant to be within the scope of the invention. For example, in the appended claims, any of the claimed embodiments can be used in any combination.

[0089] Reference is made to U.S. Provisional 62/351,662 and 62/351,803, filed on Jun. 17, 2016, U.S. Provisional 62/376,377, filed on Aug. 17, 2016, U.S. Provisional 62/410,366, filed Oct. 19, 2016, U.S. Provisional 62/432,240, filed Dec. 9, 2016, U.S. provisional 62/471,792 filed Mar. 15, 2017, and U.S. Provisional 62/484,786 filed Apr. 12, 2017. Reference is made to International PCT application PCT/US2017/038154, filed Jun. 19, 2017. Reference is made to U.S. Provisional 62/471,710, filed Mar. 15, 2017 (entitled, “Novel Cas13B Orthologues CRISPR Enzymes and Systems,” Attorney Ref: BI-10157 VP 47627.04.2149). Reference is further made to U.S. Provisional 62/432,553, filed Dec. 9, 2016, U.S. Provisional 62/456,645, filed Feb. 8, 2017, and U.S. Provisional 62/471,930, filed Mar. 15, 2017 (entitled “CRISPR Effector System Based Diagnostics,” Attorney Ref. BI-10121 BROD 0842P) and US Provisional To Be Assigned, filed Apr. 12, 2017 (entitled “CRISPR Effector System Based Diagnostics,” Attorney Ref. BI-10121 BROD 0843P).

[0090] All publications, published patent documents, and patent applications cited herein are hereby incorporated by reference to the same extent as though each individual publication, published patent document, or patent application was specifically and individually indicated as being incorporated by reference.

CRISPR Guides that May be Used in the Present Invention

[0091] As used herein, the term “crRNA” or “guide RNA” or “single guide RNA” or “sgRNA” or “one or more nucleic acid components” of a Type V or Type VI CRISPR-Cas locus effector protein comprises any polynucleotide sequence having sufficient complementarity with a target nucleic acid sequence to hybridize with the target nucleic acid sequence and direct sequence-specific binding of a nucleic acid-targeting complex to the target nucleic acid sequence. In some embodiments, the degree of complementarity, when optimally aligned using a suitable alignment algorithm, is about or more than about 50%, 60%, 75%, 80%, 85%, 90%, 95%, 97.5%, 99%, or more. Optimal alignment may be determined with the use of any suitable algorithm for aligning sequences, non-limiting example of which include the Smith-Waterman algorithm, the Needleman-Wunsch algorithm, algorithms based on the Burrows-Wheeler Transform (e.g., the Burrows Wheeler Aligner), ClustalW, Clustal X, BLAT, Novoalign (Novocraft Technologies; available at www.novocraft.com), ELAND (Illumina, San Diego, Calif.), SOAP (available at soap.genomics.org.cn), and Maq (available at maq.sourceforge.net). The ability of a guide sequence (within a nucleic acid-targeting guide RNA) to direct sequence-specific binding of a nucleic acid-targeting complex to a target nucleic acid sequence may be assessed by any suitable assay. For example, the components of a nucleic acid-targeting CRISPR system sufficient to form a nucleic acid-targeting complex, including the guide sequence to be tested, may be provided to a host cell having the corresponding target nucleic acid sequence, such as by transfection with vectors encoding the components of the nucleic acid-targeting complex, followed by an assessment of preferential targeting (e.g., cleavage) within the target nucleic acid sequence, such as by Surveyor assay as described herein. Similarly, cleavage of a target nucleic acid sequence may be evaluated in a test tube by providing the target nucleic acid sequence, components of a nucleic acid-targeting complex, including the guide sequence to be tested and a control guide sequence different from the test guide sequence, and comparing binding or rate of cleavage at the target sequence between the test and control guide sequence reactions. Other assays are possible, and will occur to those skilled in the art. A guide sequence, and hence a nucleic acid-targeting guide may be selected to target any target nucleic acid sequence. The target sequence may be DNA. The target sequence may be any RNA sequence. In some embodiments, the target sequence may be a sequence within a RNA molecule selected from the group consisting of messenger RNA (mRNA), pre-mRNA, ribosomal RNA (rRNA), transfer RNA (tRNA), micro-RNA (miRNA), small interfering RNA (siRNA), small nuclear RNA (snRNA), small nucleolar RNA (snoRNA), double stranded RNA (dsRNA), non-coding RNA (ncRNA), long non-coding RNA (lncRNA), and small cytoplasmatic RNA (scRNA). In some preferred embodiments, the target sequence may be a sequence within a RNA molecule selected from the group consisting of mRNA, pre-mRNA, and rRNA. In some preferred embodiments, the target sequence may be a sequence within a RNA molecule selected from the group consisting of ncRNA, and lncRNA. In some more preferred embodiments, the target sequence may be a sequence within an mRNA molecule or a pre-mRNA molecule.

[0092] In some embodiments, a nucleic acid-targeting guide is selected to reduce the degree secondary structure within the nucleic acid-targeting guide. In some embodiments, about or less than about 75%, 50%, 40%, 30%, 25%, 20%, 15%, 10%, 5%, 1%, or fewer of the nucleotides of the nucleic acid-targeting guide participate in self-complementary base pairing when optimally folded. Optimal folding may be determined by any suitable polynucleotide folding algorithm. Some programs are based on calculating the minimal Gibbs free energy. An example of one such algorithm is mFold, as described by Zuker and Stiegler (Nucleic Acids Res. 9 (1981), 133-148). Another example folding algorithm is the online webserver RNAfold, developed at Institute for Theoretical Chemistry at the University of Vienna, using the centroid structure prediction algorithm (see e.g., A. R. Gruber et al., 2008, Cell 106(1): 23-24; and PA Carr and GM Church, 2009, Nature Biotechnology 27(12): 1151-62).

[0093] In certain embodiments, a guide RNA or crRNA may comprise, consist essentially of, or consist of a direct repeat (DR) sequence and a guide sequence or spacer sequence. In certain embodiments, the guide RNA or crRNA may comprise, consist essentially of, or consist of a direct repeat sequence fused or linked to a guide sequence or spacer sequence. In certain embodiments, the direct repeat sequence may be located upstream (i.e., 5′) from the guide sequence or spacer sequence. In other embodiments, the direct repeat sequence may be located downstream (i.e., 3′) from the guide sequence or spacer sequence.

[0094] In certain embodiments, the crRNA comprises a stem loop, preferably a single stem loop. In certain embodiments, the direct repeat sequence forms a stem loop, preferably a single stem loop.

[0095] In certain embodiments, the spacer length of the guide RNA is from 15 to 35 nt. In certain embodiments, the spacer length of the guide RNA is at least 15 nucleotides. In certain embodiments, the spacer length is from 15 to 17 nt, e.g., 15, 16, or 17 nt, from 17 to 20 nt, e.g., 17, 18, 19, or 20 nt, from 20 to 24 nt, e.g., 20, 21, 22, 23, or 24 nt, from 23 to 25 nt, e.g., 23, 24, or 25 nt, from 24 to 27 nt, e.g., 24, 25, 26, or 27 nt, from 27-30 nt, e.g., 27, 28, 29, or 30 nt, from 30-35 nt, e.g., 30, 31, 32, 33, 34, or 35 nt, or 35 nt or longer.

[0096] The “tracrRNA” sequence or analogous terms includes any polynucleotide sequence that has sufficient complementarity with a crRNA sequence to hybridize. In some embodiments, the degree of complementarity between the tracrRNA sequence and crRNA sequence along the length of the shorter of the two when optimally aligned is about or more than about 25%, 30%, 40%, 50%, 60%, 70%, 80%, 90%, 95%, 97.5%, 99%, or higher. In some embodiments, the tracr sequence is about or more than about 5, 6, 7, 8, 9, 10, 11, 12, 13, 14, 15, 16, 17, 18, 19, 20, 25, 30, 40, 50, or more nucleotides in length. In some embodiments, the tracr sequence and crRNA sequence are contained within a single transcript, such that hybridization between the two produces a transcript having a secondary structure, such as a hairpin. In an embodiment of the invention, the transcript or transcribed polynucleotide sequence has at least two or more hairpins. In preferred embodiments, the transcript has two, three, four or five hairpins. In a further embodiment of the invention, the transcript has at most five hairpins. In a hairpin structure the portion of the sequence 5′ of the final “N” and upstream of the loop corresponds to the tracr mate sequence, and the portion of the sequence 3′ of the loop corresponds to the tracr sequence.

[0097] In general, degree of complementarity is with reference to the optimal alignment of the sca sequence and tracr sequence, along the length of the shorter of the two sequences. Optimal alignment may be determined by any suitable alignment algorithm, and may further account for secondary structures, such as self-complementarity within either the sca sequence or tracr sequence. In some embodiments, the degree of complementarity between the tracr sequence and sca sequence along the length of the shorter of the two when optimally aligned is about or more than about 25%, 30%, 40%, 50%, 60%, 70%, 80%, 90%, 95%, 97.5%, 99%, or higher.

[0098] In general, the CRISPR-Cas, CRISPR-Cas13 or CRISPR system may be as used in the foregoing documents, such as WO 2014/093622 (PCT/US2013/074667) and refers collectively to transcripts and other elements involved in the expression of or directing the activity of CRISPR-associated (“Cas”) genes, including sequences encoding a Cas gene, in particular a Cas13 gene in the case of CRISPR-Cas13, a tracr (trans-activating CRISPR) sequence (e.g. tracrRNA or an active partial tracrRNA), a tracr-mate sequence (encompassing a “direct repeat” and a tracrRNA-processed partial direct repeat in the context of an endogenous CRISPR system), a guide sequence (also referred to as a “spacer” in the context of an endogenous CRISPR system), or “RNA(s)” as that term is herein used (e.g., RNA(s) to guide Cas13, e.g. CRISPR RNA and transactivating (tracr) RNA or a single guide RNA (sgRNA) (chimeric RNA)) or other sequences and transcripts from a CRISPR locus. In general, a CRISPR system is characterized by elements that promote the formation of a CRISPR complex at the site of a target sequence (also referred to as a protospacer in the context of an endogenous CRISPR system). In the context of formation of a CRISPR complex, “target sequence” refers to a sequence to which a guide sequence is designed to have complementarity, where hybridization between a target sequence and a guide sequence promotes the formation of a CRISPR complex. The section of the guide sequence through which complementarity to the target sequence is important for cleavage activity is referred to herein as the seed sequence. A target sequence may comprise any polynucleotide, such as DNA or RNA polynucleotides. In some embodiments, a target sequence is located in the nucleus or cytoplasm of a cell, and may include nucleic acids in or from mitochondrial, organelles, vesicles, liposomes or particles present within the cell. In some embodiments, especially for non-nuclear uses, NLSs are not preferred. In some embodiments, a CRISPR system comprises one or more nuclear exports signals (NESs). In some embodiments, a CRISPR system comprises one or more NLSs and one or more NESs. In some embodiments, direct repeats may be identified in silico by searching for repetitive motifs that fulfill any or all of the following criteria: 1. found in a 2 Kb window of genomic sequence flanking the type II CRISPR locus; 2. span from 20 to 50 bp; and 3. interspaced by 20 to 50 bp. In some embodiments, 2 of these criteria may be used, for instance 1 and 2, 2 and 3, or 1 and 3. In some embodiments, all 3 criteria may be used.

[0099] In embodiments of the invention the terms guide sequence and guide RNA, i.e. RNA capable of guiding Cas to a target genomic locus, are used interchangeably as in foregoing cited documents such as WO 2014/093622 (PCT/US2013/074667). In general, a guide sequence is any polynucleotide sequence having sufficient complementarity with a target polynucleotide sequence to hybridize with the target sequence and direct sequence-specific binding of a CRISPR complex to the target sequence. In some embodiments, the degree of complementarity between a guide sequence and its corresponding target sequence, when optimally aligned using a suitable alignment algorithm, is about or more than about 50%, 60%, 75%, 80%, 85%, 90%, 95%, 97.5%, 99%, or more. Optimal alignment may be determined with the use of any suitable algorithm for aligning sequences, non-limiting example of which include the Smith-Waterman algorithm, the Needleman-Wunsch algorithm, algorithms based on the Burrows-Wheeler Transform (e.g. the Burrows Wheeler Aligner), ClustalW, Clustal X, BLAT, Novoalign (Novocraft Technologies; available at www.novocraft.com), ELAND (Illumina, San Diego, Calif.), SOAP (available at soap.genomics.org.cn), and Maq (available at maq.sourceforge.net). In some embodiments, a guide sequence is about or more than about 5, 10, 11, 12, 13, 14, 15, 16, 17, 18, 19, 20, 21, 22, 23, 24, 25, 26, 27, 28, 29, 30, 35, 40, 45, 50, 75, or more nucleotides in length. In some embodiments, a guide sequence is less than about 75, 50, 45, 40, 35, 30, 25, 20, 15, 12, or fewer nucleotides in length. Preferably the guide sequence is 10 30 nucleotides long. The ability of a guide sequence to direct sequence-specific binding of a CRISPR complex to a target sequence may be assessed by any suitable assay. For example, the components of a CRISPR system sufficient to form a CRISPR complex, including the guide sequence to be tested, may be provided to a host cell having the corresponding target sequence, such as by transfection with vectors encoding the components of the CRISPR sequence, followed by an assessment of preferential cleavage within the target sequence, such as by Surveyor assay as described herein. Similarly, cleavage of a target polynucleotide sequence may be evaluated in a test tube by providing the target sequence, components of a CRISPR complex, including the guide sequence to be tested and a control guide sequence different from the test guide sequence, and comparing binding or rate of cleavage at the target sequence between the test and control guide sequence reactions. Other assays are possible, and will occur to those skilled in the art.

[0100] In some embodiments of CRISPR-Cas systems, the degree of complementarity between a guide sequence and its corresponding target sequence can be about or more than about 50%, 60%, 75%, 80%, 85%, 90%, 95%, 97.5%, 99%, or 100%; a guide or RNA or sgRNA can be about or more than about 5, 10, 11, 12, 13, 14, 15, 16, 17, 18, 19, 20, 21, 22, 23, 24, 25, 26, 27, 28, 29, 30, 35, 40, 45, 50, 75, or more nucleotides in length; or guide or RNA or sgRNA can be less than about 75, 50, 45, 40, 35, 30, 25, 20, 15, 12, or fewer nucleotides in length; and advantageously tracr RNA is 30 or 50 nucleotides in length. However, an aspect of the invention is to reduce off-target interactions, e.g., reduce the guide interacting with a target sequence having low complementarity. Indeed, in the examples, it is shown that the invention involves mutations that result in the CRISPR-Cas system being able to distinguish between target and off-target sequences that have greater than 80% to about 95% complementarity, e.g., 83%-84% or 88-89% or 94-95% complementarity (for instance, distinguishing between a target having 18 nucleotides from an off-target of 18 nucleotides having 1, 2 or 3 mismatches). Accordingly, in the context of the present invention the degree of complementarity between a guide sequence and its corresponding target sequence is greater than 94.5% or 95% or 95.5% or 96% or 96.5% or 97% or 97.5% or 98% or 98.5% or 99% or 99.5% or 99.9%, or 100%. Off target is less than 100% or 99.9% or 99.5% or 99% or 99% or 98.5% or 98% or 97.5% or 97% or 96.5% or 96% or 95.5% or 95% or 94.5% or 94% or 93% or 92% or 91% or 90% or 89% or 88% or 87% or 86% or 85% or 84% or 83% or 82% or 81% or 80% complementarity between the sequence and the guide, with it advantageous that off target is 100% or 99.9% or 99.5% or 99% or 99% or 98.5% or 98% or 97.5% or 97% or 96.5% or 96% or 95.5% or 95% or 94.5% complementarity between the sequence and the guide.

[0101] In particularly preferred embodiments according to the invention, the guide RNA (capable of guiding Cas to a target locus) may comprise (1) a guide sequence capable of hybridizing to a genomic target locus in the eukaryotic cell; (2) a tracr sequence; and (3) a tracr mate sequence. All (1) to (3) may reside in a single RNA, i.e. an sgRNA (arranged in a 5′ to 3′ orientation), or the tracr RNA may be a different RNA than the RNA containing the guide and tracr sequence. The tracr hybridizes to the tracr mate sequence and directs the CRISPR/Cas complex to the target sequence. Where the tracr RNA is on a different RNA than the RNA containing the guide and tracr sequence, the length of each RNA may be optimized to be shortened from their respective native lengths, and each may be independently chemically modified to protect from degradation by cellular RNase or otherwise increase stability.

[0102] The methods according to the invention as described herein comprehend inducing one or more mutations in a eukaryotic cell (in vitro, i.e. in an isolated eukaryotic cell) as herein discussed comprising delivering to cell a vector as herein discussed. The mutation(s) can include the introduction, deletion, or substitution of one or more nucleotides at each target sequence of cell(s) via the guide(s) RNA(s) or sgRNA(s). The mutations can include the introduction, deletion, or substitution of 1-75 nucleotides at each target sequence of said cell(s) via the guide(s) RNA(s) or sgRNA(s). The mutations can include the introduction, deletion, or substitution of 1, 5, 10, 11, 12, 13, 14, 15, 16, 17, 18, 19, 20, 21, 22, 23, 24, 25, 26, 27, 28, 29, 30, 35, 40, 45, 50, or 75 nucleotides at each target sequence of said cell(s) via the guide(s) RNA(s) or sgRNA(s). The mutations can include the introduction, deletion, or substitution of 5, 10, 11, 12, 13, 14, 15, 16, 17, 18, 19, 20, 21, 22, 23, 24, 25, 26, 27, 28, 29, 30, 35, 40, 45, 50, or 75 nucleotides at each target sequence of said cell(s) via the guide(s) RNA(s) or sgRNA(s). The mutations include the introduction, deletion, or substitution of 10, 11, 12, 13, 14, 15, 16, 17, 18, 19, 20, 21, 22, 23, 24, 25, 26, 27, 28, 29, 30, 35, 40, 45, 50, or 75 nucleotides at each target sequence of said cell(s) via the guide(s) RNA(s) or sgRNA(s). The mutations can include the introduction, deletion, or substitution of 20, 21, 22, 23, 24, 25, 26, 27, 28, 29, 30, 35, 40, 45, 50, or 75 nucleotides at each target sequence of said cell(s) via the guide(s) RNA(s) or sgRNA(s). The mutations can include the introduction, deletion, or substitution of 40, 45, 50, 75, 100, 200, 300, 400 or 500 nucleotides at each target sequence of said cell(s) via the guide(s) RNA(s) or sgRNA(s).

[0103] For minimization of toxicity and off-target effect, it may be important to control the concentration of Cas mRNA and guide RNA delivered. Optimal concentrations of Cas mRNA and guide RNA can be determined by testing different concentrations in a cellular or non-human eukaryote animal model and using deep sequencing the analyze the extent of modification at potential off-target genomic loci. Alternatively, to minimize the level of toxicity and off-target effect, Cas nickase mRNA (for example S. pyogenes Cas9 with the D10A mutation) can be delivered with a pair of guide RNAs targeting a site of interest. Guide sequences and strategies to minimize toxicity and off-target effects can be as in WO 2014/093622 (PCT/US2013/074667); or, via mutation as herein.

[0104] Typically, in the context of an endogenous CRISPR system, formation of a CRISPR complex (comprising a guide sequence hybridized to a target sequence and complexed with one or more Cas proteins) results in cleavage of one or both strands in or near (e.g. within 1, 2, 3, 4, 5, 6, 7, 8, 9, 10, 20, 50, or more base pairs from) the target sequence. Without wishing to be bound by theory, the tracr sequence, which may comprise or consist of all or a portion of a wild-type tracr sequence (e.g. about or more than about 20, 26, 32, 45, 48, 54, 63, 67, 85, or more nucleotides of a wild-type tracr sequence), may also form part of a CRISPR complex, such as by hybridization along at least a portion of the tracr sequence to all or a portion of a tracr mate sequence that is operably linked to the guide sequence.

### ***Guide Modifications

[0105] In certain embodiments, guides of the invention comprise non-naturally occurring nucleic acids and/or non-naturally occurring nucleotides and/or nucleotide analogs, and/or chemically modifications. Non-naturally occurring nucleic acids can include, for example, mixtures of naturally and non-naturally occurring nucleotides. Non-naturally occurring nucleotides and/or nucleotide analogs may be modified at the ribose, phosphate, and/or base moiety. In an embodiment of the invention, a guide nucleic acid comprises ribonucleotides and non-ribonucleotides. In one such embodiment, a guide comprises one or more ribonucleotides and one or more deoxyribonucleotides. In an embodiment of the invention, the guide comprises one or more non-naturally occurring nucleotide or nucleotide analog such as a nucleotide with phosphorothioate linkage, boranophosphate linkage, a locked nucleic acid (LNA) nucleotides comprising a methylene bridge between the 2′ and 4′ carbons of the ribose ring, peptide nucleic acids (PNA), or bridged nucleic acids (BNA). Other examples of modified nucleotides include 2′-O-methyl analogs, 2′-deoxy analogs, 2-thiouridine analogs, N6-methyladenosine analogs, or 2′-fluoro analogs. Further examples of modified nucleotides include linkage of chemical moieties at the 2′ position, including but not limited to peptides, nuclear localization sequence (NLS), peptide nucleic acid (PNA), polyethylene glycol (PEG), triethylene glycol, or tetraethyleneglycol (TEG). Further examples of modified bases include, but are not limited to, 2-aminopurine, 5-bromo-uridine, pseudouridine N¹-methylpseudouridine (me¹Ψ), 5-methoxyuridine (5moU), inosine, 7-methylguanosine. Examples of guide RNA chemical modifications include, without limitation, incorporation of 2′-O-methyl (M), 2′-O-methyl-3′-phosphorothioate (MS), phosphorothioate (PS), S-constrained ethyl(cEt), 2′-O-methyl-3′-thioPACE (MSP), or 2′-O-methyl-3′-phosphonoacetate (MP) at one or more terminal nucleotides. Such chemically modified guides can comprise increased stability and increased activity as compared to unmodified guides, though on-target vs. off-target specificity is not predictable. (See, Hendel, 2015, Nat Biotechnol. 33(9):985-9, doi: 10.1038/nbt.3290, published online 29 Jun. 2015; Ragdarm et al., 0215, PNAS, E7110-E7111; Allerson et al., J. Med. Chem. 2005, 48:901-904; Bramsen et al., Front. Genet., 2012, 3:154; Deng et al., PNAS, 2015, 112:11870-11875; Sharma et al., MedChemComm., 2014, 5:1454-1471; Hendel et al., Nat. Biotechnol. (2015) 33(9): 985-989; Li et al., Nature Biomedical Engineering, 2017, 1, 0066 DOI:10.1038/s41551-017-0066; Ryan et al., Nucleic Acids Res. (2018) 46(2): 792-803). In some embodiments, the 5′ and/or 3′ end of a guide RNA is modified by a variety of functional moieties including fluorescent dyes, polyethylene glycol, cholesterol, proteins, or detection tags. (See Kelly et al., 2016, 1 Biotech. 233:74-83). In certain embodiments, a guide comprises ribonucleotides in a region that binds to a target RNA and one or more deoxyribonucleotides and/or nucleotide analogs in a region that binds to Ca13c. In an embodiment of the invention, deoxyribonucleotides and/or nucleotide analogs are incorporated in engineered guide structures, such as, without limitation, 5′ and/or 3′ end, stem-loop regions, and the seed region. In certain embodiments, the modification is not in the 5′-handle of the stem-loop regions. Chemical modification in the 5′-handle of the stem-loop region of a guide may abolish its function (see Li, et al., Nature Biomedical Engineering, 2017, 1:0066). In certain embodiments, at least 1, 2, 3, 4, 5, 6, 7, 8, 9, 10, 11, 12, 13, 14, 15, 16, 17, 18, 19, 20, 21, 22, 23, 24, 25, 26, 27, 28, 29, 30, 35, 40, 45, 50, or 75 nucleotides of a guide is chemically modified. In some embodiments, 3-5 nucleotides at either the 3′ or the 5′ end of a guide is chemically modified. In some embodiments, only minor modifications are introduced in the seed region, such as 2′-F modifications. In some embodiments, 2′-F modification is introduced at the 3′ end of a guide. In certain embodiments, three to five nucleotides at the 5′ and/or the 3′ end of the guide are chemically modified with 2′-O-methyl (M), 2′-O-methyl-3′-phosphorothioate (MS), S-constrained ethyl(cEt), 2′-O-methyl-3′-thioPACE (MSP), or 2′-O-methyl-3′-phosphonoacetate (MP). Such modification can enhance genome editing efficiency (see Hendel et al., Nat. Biotechnol. (2015) 33(9): 985-989; Ryan et al., Nucleic Acids Res. (2018) 46(2): 792-803). In certain embodiments, all of the phosphodiester bonds of a guide are substituted with phosphorothioates (PS) for enhancing levels of gene disruption. In certain embodiments, more than five nucleotides at the 5′ and/or the 3′ end of the guide are chemically modified with 2′-O-Me, 2′-F or S-constrained ethyl(cEt). Such chemically modified guide can mediate enhanced levels of gene disruption (see Ragdarm et al., 0215, PNAS, E7110-E7111). In an embodiment of the invention, a guide is modified to comprise a chemical moiety at its 3′ and/or 5′ end. Such moieties include, but are not limited to amine, azide, alkyne, thio, dibenzocyclooctyne (DBCO), Rhodamine, peptides, nuclear localization sequence (NLS), peptide nucleic acid (PNA), polyethylene glycol (PEG), triethylene glycol, or tetraethyleneglycol (TEG). In certain embodiment, the chemical moiety is conjugated to the guide by a linker, such as an alkyl chain. In certain embodiments, the chemical moiety of the modified guide can be used to attach the guide to another molecule, such as DNA, RNA, protein, or nanoparticles. Such chemically modified guide can be used to identify or enrich cells generically edited by a CRISPR system (see Lee et al., eLife, 2017, 6:e25312, DOI:10.7554). In some embodiments, 3 nucleotides at each of the 3′ and 5′ ends are chemically modified. In a specific embodiment, the modifications comprise 2′-O-methyl or phosphorothioate analogs. In a specific embodiment, 12 nucleotides in the tetraloop and 16 nucleotides in the stem-loop region are replaced with 2′-O-methyl analogs. Such chemical modifications improve in vivo editing and stability (see Finn et al., Cell Reports (2018), 22: 2227-2235). In some embodiments, more than 60 or 70 nucleotides of the guide are chemically modified. In some embodiments, this modification comprises replacement of nucleotides with 2′-O-methyl or 2′-fluoro nucleotide analogs or phosphorothioate (PS) modification of phosphodiester bonds. In some embodiments, the chemical modification comprises 2′-O-methyl or 2′-fluoro modification of guide nucleotides extending outside of the nuclease protein when the CRISPR complex is formed or PS modification of 20 to 30 or more nucleotides of the 3′-terminus of the guide. In a particular embodiment, the chemical modification further comprises 2′-O-methyl analogs at the 5′ end of the guide or 2′-fluoro analogs in the seed and tail regions. Such chemical modifications improve stability to nuclease degradation and maintain or enhance genome-editing activity or efficiency, but modification of all nucleotides may abolish the function of the guide (see Yin et al., Nat. Biotech. (2018), 35(12): 1179-1187). Such chemical modifications may be guided by knowledge of the structure of the CRISPR complex, including knowledge of the limited number of nuclease and RNA 2′-OH interactions (see Yin et al., Nat. Biotech. (2018), 35(12): 1179-1187). In some embodiments, one or more guide RNA nucleotides may be replaced with DNA nucleotides. In some embodiments, up to 2, 4, 6, 8, 10, or 12 RNA nucleotides of the 5′-end tail/seed guide region are replaced with DNA nucleotides. In certain embodiments, the majority of guide RNA nucleotides at the 3′ end are replaced with DNA nucleotides. In particular embodiments, 16 guide RNA nucleotides at the 3′ end are replaced with DNA nucleotides. In particular embodiments, 8 guide RNA nucleotides of the 5′-end tail/seed region and 16 RNA nucleotides at the 3′ end are replaced with DNA nucleotides. In particular embodiments, guide RNA nucleotides that extend outside of the nuclease protein when the CRISPR complex is formed are replaced with DNA nucleotides. Such replacement of multiple RNA nucleotides with DNA nucleotides leads to decreased off-target activity but similar on-target activity compared to an unmodified guide; however, replacement of all RNA nucleotides at the 3′ end may abolish the function of the guide (see Yin et al., Nat. Chem. Biol. (2018) 14, 311-316). Such modifications may be guided by knowledge of the structure of the CRISPR complex, including knowledge of the limited number of nuclease and RNA 2′-OH interactions (see Yin et al., Nat. Chem. Biol. (2018) 14, 311-316).

[0106] In one aspect of the invention, the guide comprises a modified crRNA for Cpf1, having a 5′-handle and a guide segment further comprising a seed region and a 3′-terminus. In some embodiments, the modified guide can be used with a Cpf1 of any one of Acidaminococcus sp. BV3L6 Cpf1 (AsCpf1); Francisella tularensis subsp. Novicida U112 Cpf1 (FnCpf1); L. bacterium MC2017 Cpf1 (Lb3Cpf1); Butyrivibrio proteoclasticus Cpf1 (BpCpf1); Parcubacteria bacterium GWC2011_GWC2_44_17 Cpf1 (PbCpf1); Peregrinibacteria bacterium GW2011_GWA_33_10 Cpf1 (PeCpf1); Leptospira inadai Cpf1 (LiCpf1); Smithella sp. SC_KO8D17 Cpf1 (SsCpf1); L. bacterium MA2020 Cpf1 (Lb2Cpf1); Porphyromonas crevioricanis Cpf1 (PcCpf1); Porphyromonas macacae Cpf1 (PmCpf1); Candidatus Methanoplasma termitum Cpf1 (CMtCpf1); Eubacterium eligens Cpf1 (EeCpf1); Moraxella bovoculi 237 Cpf1 (MbCpf1); Prevotella disiens Cpf1 (PdCpf1); or L. bacterium ND2006 Cpf1 (LbCpf1).

[0107] In some embodiments, the modification to the guide is a chemical modification, an insertion, a deletion or a split. In some embodiments, the chemical modification includes, but is not limited to, incorporation of 2′-O-methyl (M) analogs, 2′-deoxy analogs, 2-thiouridine analogs, N6-methyladenosine analogs, 2′-fluoro analogs, 2-aminopurine, 5-bromo-uridine, pseudouridine (Ψ), N¹-methylpseudouridine (me¹Ψ), 5-methoxyuridine (5moU), inosine, 7-methylguanosine, 2′-O-methyl-3′-phosphorothioate (MS), S-constrained ethyl(cEt), phosphorothioate (PS), 2′-O-methyl-3′-thioPACE (MSP), or 2′-O-methyl-3′-phosphonoacetate (MP). In some embodiments, the guide comprises one or more of phosphorothioate modifications. In certain embodiments, at least 1, 2, 3, 4, 5, 6, 7, 8, 9, 10, 11, 12, 13, 14, 15, 16, 17, 18, 19, 20, or 25 nucleotides of the guide are chemically modified. In some embodiments, all nucleotides are chemically modified. In certain embodiments, one or more nucleotides in the seed region are chemically modified. In certain embodiments, one or more nucleotides in the 3′-terminus are chemically modified. In certain embodiments, none of the nucleotides in the 5′-handle is chemically modified. In some embodiments, the chemical modification in the seed region is a minor modification, such as incorporation of a 2′-fluoro analog. In a specific embodiment, one nucleotide of the seed region is replaced with a 2′-fluoro analog. In some embodiments, 5 or 10 nucleotides in the 3′-terminus are chemically modified. Such chemical modifications at the 3′-terminus of the Cpf1 CrRNA improve gene cutting efficiency (see Li, et al., Nature Biomedical Engineering, 2017, 1:0066). In a specific embodiment, 5 nucleotides in the 3′-terminus are replaced with 2′-fluoro analogues. In a specific embodiment, 10 nucleotides in the 3′-terminus are replaced with 2′-fluoro analogues. In a specific embodiment, 5 nucleotides in the 3′-terminus are replaced with 2′-O-methyl (M) analogs. In some embodiments, 3 nucleotides at each of the 3′ and 5′ ends are chemically modified. In a specific embodiment, the modifications comprise 2′-O-methyl or phosphorothioate analogs. In a specific embodiment, 12 nucleotides in the tetraloop and 16 nucleotides in the stem-loop region are replaced with 2′-O-methyl analogs. Such chemical modifications improve in vivo editing and stability (see Finn et al., Cell Reports (2018), 22: 2227-2235).

[0108] In some embodiments, the loop of the 5′-handle of the guide is modified. In some embodiments, the loop of the 5′-handle of the guide is modified to have a deletion, an insertion, a split, or chemical modifications. In certain embodiments, the loop comprises 3, 4, or 5 nucleotides. In certain embodiments, the loop comprises the sequence of UCUU, UUUU, UAUU, or UGUU. In some embodiments, the guide molecule forms a stemloop with a separate non-covalently linked sequence, which can be DNA or RNA.

### ***Synthetically Linked Guide

[0109] In one aspect, the guide comprises a tracr sequence and a tracr mate sequence that are chemically linked or conjugated via a non-phosphodiester bond. In one aspect, the guide comprises a tracr sequence and a tracr mate sequence that are chemically linked or conjugated via a non-nucleotide loop. In some embodiments, the tracr and tracr mate sequences are joined via a non-phosphodiester covalent linker. Examples of the covalent linker include but are not limited to a chemical moiety selected from the group consisting of carbamates, ethers, esters, amides, imines, amidines, aminotrizines, hydrozone, disulfides, thioethers, thioesters, phosphorothioates, phosphorodithioates, sulfonamides, sulfonates, fulfones, sulfoxides, ureas, thioureas, hydrazide, oxime, triazole, photolabile linkages, C—C bond forming groups such as Diels-Alder cyclo-addition pairs or ring-closing metathesis pairs, and Michael reaction pairs.

[0110] In some embodiments, the tracr and tracr mate sequences are first synthesized using the standard phosphoramidite synthetic protocol (Herdewijn, P., ed., Methods in Molecular Biology Col 288, Oligonucleotide Synthesis: Methods and Applications, Humana Press, New Jersey (2012)). In some embodiments, the tracr or tracr mate sequences can be functionalized to contain an appropriate functional group for ligation using the standard protocol known in the art (Hermanson, G. T., Bioconjugate Techniques, Academic Press (2013)). Examples of functional groups include, but are not limited to, hydroxyl, amine, carboxylic acid, carboxylic acid halide, carboxylic acid active ester, aldehyde, carbonyl, chlorocarbonyl, imidazolylcarbonyl, hydrozide, semicarbazide, thio semicarbazide, thiol, maleimide, haloalkyl, sufonyl, ally, propargyl, diene, alkyne, and azide. Once the tracr and the tracr mate sequences are functionalized, a covalent chemical bond or linkage can be formed between the two oligonucleotides. Examples of chemical bonds include, but are not limited to, those based on carbamates, ethers, esters, amides, imines, amidines, aminotrizines, hydrozone, disulfides, thioethers, thioesters, phosphorothioates, phosphorodithioates, sulfonamides, sulfonates, fulfones, sulfoxides, ureas, thioureas, hydrazide, oxime, triazole, photolabile linkages, C—C bond forming groups such as Diels-Alder cyclo-addition pairs or ring-closing metathesis pairs, and Michael reaction pairs.

[0111] In some embodiments, the tracr and tracr mate sequences can be chemically synthesized. In some embodiments, the chemical synthesis uses automated, solid-phase oligonucleotide synthesis machines with 2′-acetoxyethyl orthoester (2′-ACE) (Scaringe et al., J. Am. Chem. Soc. (1998) 120: 11820-11821; Scaringe, Methods Enzymol. (2000) 317: 3-18) or 2′-thionocarbamate (2′-TC) chemistry (Dellinger et al., J. Am. Chem. Soc. (2011) 133: 11540-11546; Hendel et al., Nat. Biotechnol. (2015) 33:985-989).

[0112] In some embodiments, the tracr and tracr mate sequences can be covalently linked using various bioconjugation reactions, loops, bridges, and non-nucleotide links via modifications of sugar, internucleotide phosphodiester bonds, purine and pyrimidine residues. Sletten et al., Angew. Chem. Int. Ed. (2009) 48:6974-6998; Manoharan, M. Curr. Opin. Chem. Biol. (2004) 8: 570-9; Behlke et al., Oligonucleotides (2008) 18: 305-19; Watts, et al., Drug. Discov. Today (2008) 13: 842-55; Shukla, et al., ChemMedChem (2010) 5: 328-49.

[0113] In some embodiments, the tracr and tracr mate sequences can be covalently linked using click chemistry. In some embodiments, the tracr and tracr mate sequences can be covalently linked using a triazole linker. In some embodiments, the tracr and tracr mate sequences can be covalently linked using Huisgen 1,3-dipolar cycloaddition reaction involving an alkyne and azide to yield a highly stable triazole linker (He et al., ChemBioChem (2015) 17: 1809-1812; WO 2016/186745). In some embodiments, the tracr and tracr mate sequences are covalently linked by ligating a 5′-hexyne tracrRNA and a 3′-azide crRNA. In some embodiments, either or both of the 5′-hexyne tracrRNA and a 3′-azide crRNA can be protected with 2′-acetoxyethl orthoester (2′-ACE) group, which can be subsequently removed using Dharmacon protocol (Scaringe et al., J. Am. Chem. Soc. (1998) 120: 11820-11821; Scaringe, Methods Enzymol. (2000) 317: 3-18).

[0114] In some embodiments, the tracr and tracr mate sequences can be covalently linked via a linker (e.g., a non-nucleotide loop) that comprises a moiety such as spacers, attachments, bioconjugates, chromophores, reporter groups, dye labeled RNAs, and non-naturally occurring nucleotide analogues. More specifically, suitable spacers for purposes of this invention include, but are not limited to, polyethers (e.g., polyethylene glycols, polyalcohols, polypropylene glycol or mixtures of ethylene and propylene glycols), polyamines group (e.g., spennine, spermidine and polymeric derivatives thereof), polyesters (e.g., poly(ethyl acrylate)), polyphosphodiesters, alkylenes, and combinations thereof. Suitable attachments include any moiety that can be added to the linker to add additional properties to the linker, such as but not limited to, fluorescent labels. Suitable bioconjugates include, but are not limited to, peptides, glycosides, lipids, cholesterol, phospholipids, diacyl glycerols and dialkyl glycerols, fatty acids, hydrocarbons, enzyme substrates, steroids, biotin, digoxigenin, carbohydrates, polysaccharides. Suitable chromophores, reporter groups, and dye-labeled RNAs include, but are not limited to, fluorescent dyes such as fluorescein and rhodamine, chemiluminescent, electrochemiluminescent, and bioluminescent marker compounds. The design of example linkers conjugating two RNA components are also described in WO 2004/015075.

[0115] The linker (e.g., a non-nucleotide loop) can be of any length. In some embodiments, the linker has a length equivalent to about 0-16 nucleotides. In some embodiments, the linker has a length equivalent to about 0-8 nucleotides. In some embodiments, the linker has a length equivalent to about 0-4 nucleotides. In some embodiments, the linker has a length equivalent to about 2 nucleotides. Example linker design is also described in WO2011/008730.

[0116] A typical Type II Cas sgRNA comprises (in 5′ to 3′ direction): a guide sequence, a poly U tract, a first complimentary stretch (the “repeat”), a loop (tetraloop), a second complimentary stretch (the “anti-repeat” being complimentary to the repeat), a stem, and further stem loops and stems and a poly A (often poly U in RNA) tail (terminator). In preferred embodiments, certain aspects of guide architecture are retained, certain aspect of guide architecture cam be modified, for example by addition, subtraction, or substitution of features, whereas certain other aspects of guide architecture are maintained. Preferred locations for engineered sgRNA modifications, including but not limited to insertions, deletions, and substitutions include guide termini and regions of the sgRNA that are exposed when complexed with CRISPR protein and/or target, for example the tetraloop and/or loop2.

[0117] In certain embodiments, guides of the invention comprise specific binding sites (e.g. aptamers) for adapter proteins, which may comprise one or more functional domains (e.g. via fusion protein). When such a guides forms a CRISPR complex (i.e. CRISPR enzyme binding to guide and target) the adapter proteins bind and, the functional domain associated with the adapter protein is positioned in a spatial orientation which is advantageous for the attributed function to be effective. For example, if the functional domain is a transcription activator (e.g. VP64 or p65), the transcription activator is placed in a spatial orientation which allows it to affect the transcription of the target. Likewise, a transcription repressor will be advantageously positioned to affect the transcription of the target and a nuclease (e.g. Fok1) will be advantageously positioned to cleave or partially cleave the target.

[0118] The skilled person will understand that modifications to the guide which allow for binding of the adapter+functional domain but not proper positioning of the adapter+functional domain (e.g. due to steric hindrance within the three dimensional structure of the CRISPR complex) are modifications which are not intended. The one or more modified guide may be modified at the tetra loop, the stem loop 1, stem loop 2, or stem loop 3, as described herein, preferably at either the tetra loop or stem loop 2, and most preferably at both the tetra loop and stem loop 2.

[0119] The repeat:anti repeat duplex will be apparent from the secondary structure of the sgRNA. It may be typically a first complimentary stretch after (in 5′ to 3′ direction) the poly U tract and before the tetraloop; and a second complimentary stretch after (in 5′ to 3′ direction) the tetraloop and before the poly A tract. The first complimentary stretch (the “repeat”) is complimentary to the second complimentary stretch (the “anti-repeat”). As such, they Watson-Crick base pair to form a duplex of dsRNA when folded back on one another. As such, the anti-repeat sequence is the complimentary sequence of the repeat and in terms to A-U or C-G base pairing, but also in terms of the fact that the anti-repeat is in the reverse orientation due to the tetraloop.

[0120] In an embodiment of the invention, modification of guide architecture comprises replacing bases in stemloop 2. For example, in some embodiments, “actt” (“acuu” in RNA) and “aagt” (“aagu” in RNA) bases in stemloop2 are replaced with “cgcc” and “gcgg”. In some embodiments, “actt” and “aagt” bases in stemloop2 are replaced with complimentary GC-rich regions of 4 nucleotides. In some embodiments, the complimentary GC-rich regions of 4 nucleotides are “cgcc” and “gcgg” (both in 5′ to 3′ direction). In some embodiments, the complimentary GC-rich regions of 4 nucleotides are “gcgg” and “cgcc” (both in 5′ to 3′ direction). Other combination of C and G in the complimentary GC-rich regions of 4 nucleotides will be apparent including CCCC and GGGG.

[0121] In one aspect, the stemloop 2, e.g., “ACTTgtttAAGT” can be replaced by any “XXXXgtttYYYY”, e.g., where XXXX and YYYY represent any complementary sets of nucleotides that together will base pair to each other to create a stem.

[0122] In one aspect, the stem comprises at least about 4 bp comprising complementary X and Y sequences, although stems of more, e.g., 5, 6, 7, 8, 9, 10, 11 or 12 or fewer, e.g., 3, 2, base pairs are also contemplated. Thus, for example X2-12 and Y2-12 (wherein X and Y represent any complementary set of nucleotides) may be contemplated. In one aspect, the stem made of the X and Y nucleotides, together with the “gttt,” will form a complete hairpin in the overall secondary structure; and, this may be advantageous and the amount of base pairs can be any amount that forms a complete hairpin. In one aspect, any complementary X:Y basepairing sequence (e.g., as to length) is tolerated, so long as the secondary structure of the entire sgRNA is preserved. In one aspect, the stem can be a form of X:Y basepairing that does not disrupt the secondary structure of the whole sgRNA in that it has a DR:tracr duplex, and 3 stemloops. In one aspect, the “gttt” tetraloop that connects ACTT and AAGT (or any alternative stem made of X:Y basepairs) can be any sequence of the same length (e.g., 4 basepair) or longer that does not interrupt the overall secondary structure of the sgRNA. In one aspect, the stemloop can be something that further lengthens stemloop2, e.g. can be MS2 aptamer. In one aspect, the stemloop3 “GGCACCGagtCGGTGC” can likewise take on a “XXXXXXXagt” form, e.g., wherein X7 and Y7 represent any complementary sets of nucleotides that together will base pair to each other to create a stem. In one aspect, the stem comprises about 7 bp comprising complementary X and Y sequences, although stems of more or fewer basepairs are also contemplated. In one aspect, the stem made of the X and Y nucleotides, together with the “agt”, will form a complete hairpin in the overall secondary structure. In one aspect, any complementary X:Y basepairing sequence is tolerated, so long as the secondary structure of the entire sgRNA is preserved. In one aspect, the stem can be a form of X:Y basepairing that doesn't disrupt the secondary structure of the whole sgRNA in that it has a DR:tracr duplex, and 3 stemloops. In one aspect, the “agt” sequence of the stemloop 3 can be extended or be replaced by an aptamer, e.g., a MS2 aptamer or sequence that otherwise generally preserves the architecture of stemloop3. In one aspect for alternative Stemloops 2 and/or 3, each X and Y pair can refer to any basepair. In one aspect, non-Watson Crick basepairing is contemplated, where such pairing otherwise generally preserves the architecture of the stemloop at that position.

[0123] In one aspect, the DR:tracrRNA duplex can be replaced with the form: gYYYYag(N)NNNNxxxxNNNN(AAN)uuRRRRu (using standard IUPAC nomenclature for nucleotides), wherein (N) and (AAN) represent part of the bulge in the duplex, and “xxxx” represents a linker sequence. NNNN on the direct repeat can be anything so long as it basepairs with the corresponding NNNN portion of the tracrRNA. In one aspect, the DR:tracrRNA duplex can be connected by a linker of any length (xxxx . . . ), any base composition, as long as it doesn't alter the overall structure.

[0124] In one aspect, the sgRNA structural requirement is to have a duplex and 3 stemloops. In most aspects, the actual sequence requirement for many of the particular base requirements are lax, in that the architecture of the DR:tracrRNA duplex should be preserved, but the sequence that creates the architecture, i.e., the stems, loops, bulges, etc., may be altered.

### ***Aptamers

[0125] One guide with a first aptamer/RNA-binding protein pair can be linked or fused to an activator, whilst a second guide with a second aptamer/RNA-binding protein pair can be linked or fused to a repressor. The guides are for different targets (loci), so this allows one gene to be activated and one repressed. For example, the following schematic shows such an approach:

Guide 1—MS2 aptamer—MS2 RNA-binding protein—VP64 activator; and
Guide 2—PP7 aptamer—PP7 RNA-binding protein—SID4x repressor.

[0126] The present invention also relates to orthogonal PP7/MS2 gene targeting. In this example, sgRNA targeting different loci are modified with distinct RNA loops in order to recruit MS2-VP64 or PP7-SID4X, which activate and repress their target loci, respectively. PP7 is the RNA-binding coat protein of the bacteriophage Pseudomonas. Like MS2, it binds a specific RNA sequence and secondary structure. The PP7 RNA-recognition motif is distinct from that of MS2. Consequently, PP7 and MS2 can be multiplexed to mediate distinct effects at different genomic loci simultaneously. For example, an sgRNA targeting locus A can be modified with MS2 loops, recruiting MS2-VP64 activators, while another sgRNA targeting locus B can be modified with PP7 loops, recruiting PP7-SID4X repressor domains. In the same cell, dCas13 can thus mediate orthogonal, locus-specific modifications. This principle can be extended to incorporate other orthogonal RNA-binding proteins such as Q-beta.

[0127] An alternative option for orthogonal repression includes incorporating non-coding RNA loops with transactive repressive function into the guide (either at similar positions to the MS2/PP7 loops integrated into the guide or at the 3′ terminus of the guide). For instance, guides were designed with non-coding (but known to be repressive) RNA loops (e.g. using the Alu repressor (in RNA) that interferes with RNA polymerase II in mammalian cells). The Alu RNA sequence was located: in place of the MS2 RNA sequences as used herein (e.g. at tetraloop and/or stem loop 2); and/or at 3′ terminus of the guide. This gives possible combinations of MS2, PP7 or Alu at the tetraloop and/or stemloop 2 positions, as well as, optionally, addition of Alu at the 3′ end of the guide (with or without a linker).

[0128] The use of two different aptamers (distinct RNA) allows an activator-adaptor protein fusion and a repressor-adaptor protein fusion to be used, with different guides, to activate expression of one gene, whilst repressing another. They, along with their different guides can be administered together, or substantially together, in a multiplexed approach. A large number of such modified guides can be used all at the same time, for example 10 or 20 or 30 and so forth, whilst only one (or at least a minimal number) of Cas13s to be delivered, as a comparatively small number of Cas13s can be used with a large number modified guides. The adaptor protein may be associated (preferably linked or fused to) one or more activators or one or more repressors. For example, the adaptor protein may be associated with a first activator and a second activator. The first and second activators may be the same, but they are preferably different activators. For example, one might be VP64, whilst the other might be p65, although these are just examples and other transcriptional activators are envisaged. Three or more or even four or more activators (or repressors) may be used, but package size may limit the number being higher than 5 different functional domains. Linkers are preferably used, over a direct fusion to the adaptor protein, where two or more functional domains are associated with the adaptor protein. Suitable linkers might include the GlySer linker.

[0129] It is also envisaged that the enzyme-guide complex as a whole may be associated with two or more functional domains. For example, there may be two or more functional domains associated with the enzyme, or there may be two or more functional domains associated with the guide (via one or more adaptor proteins), or there may be one or more functional domains associated with the enzyme and one or more functional domains associated with the guide (via one or more adaptor proteins).

[0130] The fusion between the adaptor protein and the activator or repressor may include a linker. For example, GlySer linkers GGGS can be used. They can be used in repeats of 3 ((GGGGS)₃) or 6, 9 or even 12 or more, to provide suitable lengths, as required. Linkers can be used between the RNA-binding protein and the functional domain (activator or repressor), or between the CRISPR Enzyme (Cas13) and the functional domain (activator or repressor). The linkers the user to engineer appropriate amounts of “mechanical flexibility”.

***Dead guides: Guide RNAs comprising a dead guide sequence may be used in the present invention

[0131] In one aspect, the invention provides guide sequences which are modified in a manner which allows for formation of the CRISPR complex and successful binding to the target, while at the same time, not allowing for successful nuclease activity (i.e. without nuclease activity/without indel activity). For matters of explanation such modified guide sequences are referred to as “dead guides” or “dead guide sequences”. These dead guides or dead guide sequences can be thought of as catalytically inactive or conformationally inactive with regard to nuclease activity. Nuclease activity may be measured using surveyor analysis or deep sequencing as commonly used in the art, preferably surveyor analysis. Similarly, dead guide sequences may not sufficiently engage in productive base pairing with respect to the ability to promote catalytic activity or to distinguish on-target and off-target binding activity. Briefly, the surveyor assay involves purifying and amplifying a CRISPR target site for a gene and forming heteroduplexes with primers amplifying the CRISPR target site. After re-anneal, the products are treated with SURVEYOR nuclease and SURVEYOR enhancer S (Transgenomics) following the manufacturer's recommended protocols, analyzed on gels, and quantified based upon relative band intensities.

[0132] Hence, in a related aspect, the invention provides a non-naturally occurring or engineered composition Cas13 CRISPR-Cas system comprising a functional Cas13 as described herein, and guide RNA (gRNA) wherein the gRNA comprises a dead guide sequence whereby the gRNA is capable of hybridizing to a target sequence such that the Cas13 CRISPR-Cas system is directed to a genomic locus of interest in a cell without detectable indel activity resultant from nuclease activity of a non-mutant Cas13 enzyme of the system as detected by a SURVEYOR assay. For shorthand purposes, a gRNA comprising a dead guide sequence whereby the gRNA is capable of hybridizing to a target sequence such that the Cas13 CRISPR-Cas system is directed to a genomic locus of interest in a cell without detectable indel activity resultant from nuclease activity of a non-mutant Cas13 enzyme of the system as detected by a SURVEYOR assay is herein termed a “dead gRNA”. It is to be understood that any of the gRNAs according to the invention as described herein elsewhere may be used as dead gRNAs/gRNAs comprising a dead guide sequence as described herein below. Any of the methods, products, compositions and uses as described herein elsewhere is equally applicable with the dead gRNAs/gRNAs comprising a dead guide sequence as further detailed below. By means of further guidance, the following particular aspects and embodiments are provided.

[0133] The ability of a dead guide sequence to direct sequence-specific binding of a CRISPR complex to a target sequence may be assessed by any suitable assay. For example, the components of a CRISPR system sufficient to form a CRISPR complex, including the dead guide sequence to be tested, may be provided to a host cell having the corresponding target sequence, such as by transfection with vectors encoding the components of the CRISPR sequence, followed by an assessment of preferential cleavage within the target sequence, such as by Surveyor assay as described herein. Similarly, cleavage of a target polynucleotide sequence may be evaluated in a test tube by providing the target sequence, components of a CRISPR complex, including the dead guide sequence to be tested and a control guide sequence different from the test dead guide sequence, and comparing binding or rate of cleavage at the target sequence between the test and control guide sequence reactions. Other assays are possible, and will occur to those skilled in the art. A dead guide sequence may be selected to target any target sequence. In some embodiments, the target sequence is a sequence within a genome of a cell.

[0134] As explained further herein, several structural parameters allow for a proper framework to arrive at such dead guides. Dead guide sequences are shorter than respective guide sequences which result in active Cas13-specific indel formation. Dead guides are 5%, 10%, 20%, 30%, 40%, 50%, shorter than respective guides directed to the same Cas13 leading to active Cas13-specific indel formation.

[0135] As explained below and known in the art, one aspect of gRNA-Cas13 specificity is the direct repeat sequence, which is to be appropriately linked to such guides. In particular, this implies that the direct repeat sequences are designed dependent on the origin of the Cas13. Thus, structural data available for validated dead guide sequences may be used for designing Cas13 specific equivalents. Structural similarity between, e.g., the orthologous nuclease domains RuvC of two or more Cas13 effector proteins may be used to transfer design equivalent dead guides. Thus, the dead guide herein may be appropriately modified in length and sequence to reflect such Cas13 specific equivalents, allowing for formation of the CRISPR complex and successful binding to the target, while at the same time, not allowing for successful nuclease activity.

[0136] The use of dead guides in the context herein as well as the state of the art provides a surprising and unexpected platform for network biology and/or systems biology in both in vitro, ex vivo, and in vivo applications, allowing for multiplex gene targeting, and in particular bidirectional multiplex gene targeting. Prior to the use of dead guides, addressing multiple targets, for example for activation, repression and/or silencing of gene activity, has been challenging and in some cases not possible. With the use of dead guides, multiple targets, and thus multiple activities, may be addressed, for example, in the same cell, in the same animal, or in the same patient. Such multiplexing may occur at the same time or staggered for a desired timeframe.

[0137] For example, the dead guides now allow for the first time to use gRNA as a means for gene targeting, without the consequence of nuclease activity, while at the same time providing directed means for activation or repression. Guide RNA comprising a dead guide may be modified to further include elements in a manner which allow for activation or repression of gene activity, in particular protein adaptors (e.g. aptamers) as described herein elsewhere allowing for functional placement of gene effectors (e.g. activators or repressors of gene activity). One example is the incorporation of aptamers, as explained herein and in the state of the art. By engineering the gRNA comprising a dead guide to incorporate protein-interacting aptamers (Konermann et al., “Genome-scale transcription activation by an engineered CRISPR-Cas13 complex,” doi:10.1038/nature14136, incorporated herein by reference), one may assemble a synthetic transcription activation complex consisting of multiple distinct effector domains. Such may be modeled after natural transcription activation processes. For example, an aptamer, which selectively binds an effector (e.g. an activator or repressor; dimerized MS2 bacteriophage coat proteins as fusion proteins with an activator or repressor), or a protein which itself binds an effector (e.g. activator or repressor) may be appended to a dead gRNA tetraloop and/or a stem-loop 2. In the case of MS2, the fusion protein MS2-VP64 binds to the tetraloop and/or stem-loop 2 and in turn mediates transcriptional up-regulation, for example for Neurog2. Other transcriptional activators are, for example, VP64. P65, HSF1, and MyoD1. By mere example of this concept, replacement of the MS2 stem-loops with PP7-interacting stem-loops may be used to recruit repressive elements.

[0138] Thus, one aspect is a gRNA of the invention which comprises a dead guide, wherein the gRNA further comprises modifications which provide for gene activation or repression, as described herein. The dead gRNA may comprise one or more aptamers. The aptamers may be specific to gene effectors, gene activators or gene repressors. Alternatively, the aptamers may be specific to a protein which in turn is specific to and recruits/binds a specific gene effector, gene activator or gene repressor. If there are multiple sites for activator or repressor recruitment, it is preferred that the sites are specific to either activators or repressors. If there are multiple sites for activator or repressor binding, the sites may be specific to the same activators or same repressors. The sites may also be specific to different activators or different repressors. The gene effectors, gene activators, gene repressors may be present in the form of fusion proteins.

[0139] In an embodiment, the dead gRNA as described herein or the Cas13 CRISPR-Cas complex as described herein includes a non-naturally occurring or engineered composition comprising two or more adaptor proteins, wherein each protein is associated with one or more functional domains and wherein the adaptor protein binds to the distinct RNA sequence(s) inserted into the at least one loop of the dead gRNA.

[0140] Hence, an aspect provides a non-naturally occurring or engineered composition comprising a guide RNA (gRNA) comprising a dead guide sequence capable of hybridizing to a target sequence in a genomic locus of interest in a cell, wherein the dead guide sequence is as defined herein, a Cas13 comprising at least one or more nuclear localization sequences, wherein the Cas13 optionally comprises at least one mutation wherein at least one loop of the dead gRNA is modified by the insertion of distinct RNA sequence(s) that bind to one or more adaptor proteins, and wherein the adaptor protein is associated with one or more functional domains; or, wherein the dead gRNA is modified to have at least one non-coding functional loop, and wherein the composition comprises two or more adaptor proteins, wherein the each protein is associated with one or more functional domains.

[0141] In certain embodiments, the adaptor protein is a fusion protein comprising the functional domain, the fusion protein optionally comprising a linker between the adaptor protein and the functional domain, the linker optionally including a GlySer linker.

[0142] In certain embodiments, the at least one loop of the dead gRNA is not modified by the insertion of distinct RNA sequence(s) that bind to the two or more adaptor proteins.

[0143] In certain embodiments, the one or more functional domains associated with the adaptor protein is a transcriptional activation domain.

[0144] In certain embodiments, the one or more functional domains associated with the adaptor protein is a transcriptional activation domain comprising VP64, p65, MyoD1, HSF1, RTA or SETT/9.

[0145] In certain embodiments, the one or more functional domains associated with the adaptor protein is a transcriptional repressor domain.

[0146] In certain embodiments, the transcriptional repressor domain is a KRAB domain.

[0147] In certain embodiments, the transcriptional repressor domain is a NuE domain, NcoR domain, SID domain or a SID4X domain.

[0148] In certain embodiments, at least one of the one or more functional domains associated with the adaptor protein have one or more activities comprising methylase activity, demethylase activity, transcription activation activity, transcription repression activity, transcription release factor activity, histone modification activity, DNA integration activity RNA cleavage activity, DNA cleavage activity or nucleic acid binding activity.

[0149] In certain embodiments, the DNA cleavage activity is due to a Fok1 nuclease.

[0150] In certain embodiments, the dead gRNA is modified so that, after dead gRNA binds the adaptor protein and further binds to the Cas13 and target, the functional domain is in a spatial orientation allowing for the functional domain to function in its attributed function.

[0151] In certain embodiments, the at least one loop of the dead gRNA is tetra loop and/or loop2. In certain embodiments, the tetra loop and loop 2 of the dead gRNA are modified by the insertion of the distinct RNA sequence(s).

[0152] In certain embodiments, the insertion of distinct RNA sequence(s) that bind to one or more adaptor proteins is an aptamer sequence. In certain embodiments, the aptamer sequence is two or more aptamer sequences specific to the same adaptor protein. In certain embodiments, the aptamer sequence is two or more aptamer sequences specific to different adaptor protein.

[0153] In certain embodiments, the adaptor protein comprises MS2, PP7, Qβ, F2, GA, fr, JP501, M12, R17, BZ13, JP34, JP500, KU1, M11, MX1, TW18, VK, SP, FI, ID2, NL95, TW19, AP205, ϕCb5, ϕCb8r, ϕCb12r, ϕCb23r, 7s, PRR1.

[0154] In certain embodiments, the cell is a eukaryotic cell. In certain embodiments, the eukaryotic cell is a mammalian cell, optionally a mouse cell. In certain embodiments, the mammalian cell is a human cell.

[0155] In certain embodiments, a first adaptor protein is associated with a p65 domain and a second adaptor protein is associated with a HSF1 domain.

[0156] In certain embodiments, the composition comprises a Cas13 CRISPR-Cas complex having at least three functional domains, at least one of which is associated with the Cas13 and at least two of which are associated with dead gRNA.

[0157] In certain embodiments, the composition further comprises a second gRNA, wherein the second gRNA is a live gRNA capable of hybridizing to a second target sequence such that a second Cas13 CRISPR-Cas system is directed to a second genomic locus of interest in a cell with detectable indel activity at the second genomic locus resultant from nuclease activity of the Cas13 enzyme of the system.

[0158] In certain embodiments, the composition further comprises a plurality of dead gRNAs and/or a plurality of live gRNAs.

[0159] One aspect of the invention is to take advantage of the modularity and customizability of the gRNA scaffold to establish a series of gRNA scaffolds with different binding sites (in particular aptamers) for recruiting distinct types of effectors in an orthogonal manner. Again, for matters of example and illustration of the broader concept, replacement of the MS2 stem-loops with PP7-interacting stem-loops may be used to bind/recruit repressive elements, enabling multiplexed bidirectional transcriptional control. Thus, in general, gRNA comprising a dead guide may be employed to provide for multiplex transcriptional control and preferred bidirectional transcriptional control. This transcriptional control is most preferred of genes. For example, one or more gRNA comprising dead guide(s) may be employed in targeting the activation of one or more target genes. At the same time, one or more gRNA comprising dead guide(s) may be employed in targeting the repression of one or more target genes. Such a sequence may be applied in a variety of different combinations, for example the target genes are first repressed and then at an appropriate period other targets are activated, or select genes are repressed at the same time as select genes are activated, followed by further activation and/or repression. As a result, multiple components of one or more biological systems may advantageously be addressed together.

[0160] In an aspect, the invention provides nucleic acid molecule(s) encoding dead gRNA or the Cas13 CRISPR-Cas complex or the composition as described herein.

[0161] In an aspect, the invention provides a vector system comprising: a nucleic acid molecule encoding dead guide RNA as defined herein. In certain embodiments, the vector system further comprises a nucleic acid molecule(s) encoding Cas13. In certain embodiments, the vector system further comprises a nucleic acid molecule(s) encoding (live) gRNA. In certain embodiments, the nucleic acid molecule or the vector further comprises regulatory element(s) operable in a eukaryotic cell operably linked to the nucleic acid molecule encoding the guide sequence (gRNA) and/or the nucleic acid molecule encoding Cas9 and/or the optional nuclear localization sequence(s).

[0162] In another aspect, structural analysis may also be used to study interactions between the dead guide and the active Cas13 nuclease that enable DNA binding, but no DNA cutting. In this way amino acids important for nuclease activity of Cas13 are determined. Modification of such amino acids allows for improved Cas13 enzymes used for gene editing.

[0163] A further aspect is combining the use of dead guides as explained herein with other applications of CRISPR, as explained herein as well as known in the art. For example, gRNA comprising dead guide(s) for targeted multiplex gene activation or repression or targeted multiplex bidirectional gene activation/repression may be combined with gRNA comprising guides which maintain nuclease activity, as explained herein. Such gRNA comprising guides which maintain nuclease activity may or may not further include modifications which allow for repression of gene activity (e.g. aptamers). Such gRNA comprising guides which maintain nuclease activity may or may not further include modifications which allow for activation of gene activity (e.g. aptamers). In such a manner, a further means for multiplex gene control is introduced (e.g. multiplex gene targeted activation without nuclease activity/without indel activity may be provided at the same time or in combination with gene targeted repression with nuclease activity).

[0164] For example, 1) using one or more gRNA (e.g. 1-50, 1-40, 1-30, 1-20, preferably 1-10, more preferably 1-5) comprising dead guide(s) targeted to one or more genes and further modified with appropriate aptamers for the recruitment of gene activators; 2) may be combined with one or more gRNA (e.g. 1-50, 1-40, 1-30, 1-20, preferably 1-10, more preferably 1-5) comprising dead guide(s) targeted to one or more genes and further modified with appropriate aptamers for the recruitment of gene repressors. 1) and/or 2) may then be combined with 3) one or more gRNA (e.g. 1-50, 1-40, 1-30, 1-20, preferably 1-10, more preferably 1-5) targeted to one or more genes. This combination can then be carried out in turn with 1)+2)+3) with 4) one or more gRNA (e.g. 1-50, 1-40, 1-30, 1-20, preferably 1-10, more preferably 1-5) targeted to one or more genes and further modified with appropriate aptamers for the recruitment of gene activators. This combination can then be carried in turn with 1)+2)+3)+4) with 5) one or more gRNA (e.g. 1-50, 1-40, 1-30, 1-20, preferably 1-10, more preferably 1-5) targeted to one or more genes and further modified with appropriate aptamers for the recruitment of gene repressors. As a result various uses and combinations are included in the invention. For example, combination 1)+2); combination 1)+3); combination 2)+3); combination 1)+2)+3); combination 1)+2)+3)+4); combination 1)+3)+4); combination 2)+3)+4); combination 1)+2)+4); combination 1)+2)+3)+4)+5); combination 1)+3)+4)+5); combination 2)+3)+4)+5); combination 1)+2)+4)+5); combination 1)+2)+3)+5); combination 1)+3)+5); combination 2)+3)+5); combination 1)+2)+5).

[0165] In an aspect, the invention provides an algorithm for designing, evaluating, or selecting a dead guide RNA targeting sequence (dead guide sequence) for guiding a Cas13 CRISPR-Cas system to a target gene locus. In particular, it has been determined that dead guide RNA specificity relates to and can be optimized by varying i) GC content and ii) targeting sequence length. In an aspect, the invention provides an algorithm for designing or evaluating a dead guide RNA targeting sequence that minimizes off-target binding or interaction of the dead guide RNA. In an embodiment of the invention, the algorithm for selecting a dead guide RNA targeting sequence for directing a CRISPR system to a gene locus in an organism comprises a) locating one or more CRISPR motifs in the gene locus, analyzing the 20 nt sequence downstream of each CRISPR motif by i) determining the GC content of the sequence; and ii) determining whether there are off-target matches of the 15 downstream nucleotides nearest to the CRISPR motif in the genome of the organism, and c) selecting the 15 nucleotide sequence for use in a dead guide RNA if the GC content of the sequence is 70% or less and no off-target matches are identified. In an embodiment, the sequence is selected for a targeting sequence if the GC content is 60% or less. In certain embodiments, the sequence is selected for a targeting sequence if the GC content is 55% or less, 50% or less, 45% or less, 40% or less, 35% or less or 30% or less. In an embodiment, two or more sequences of the gene locus are analyzed and the sequence having the lowest GC content, or the next lowest GC content, or the next lowest GC content is selected. In an embodiment, the sequence is selected for a targeting sequence if no off-target matches are identified in the genome of the organism. In an embodiment, the targeting sequence is selected if no off-target matches are identified in regulatory sequences of the genome.

[0166] In an aspect, the invention provides a method of selecting a dead guide RNA targeting sequence for directing a functionalized CRISPR system to a gene locus in an organism, which comprises: a) locating one or more CRISPR motifs in the gene locus; b) analyzing the 20 nt sequence downstream of each CRISPR motif by: i) determining the GC content of the sequence; and ii) determining whether there are off-target matches of the first 15 nt of the sequence in the genome of the organism; c) selecting the sequence for use in a guide RNA if the GC content of the sequence is 70% or less and no off-target matches are identified. In an embodiment, the sequence is selected if the GC content is 50% or less. In an embodiment, the sequence is selected if the GC content is 40% or less. In an embodiment, the sequence is selected if the GC content is 30% or less. In an embodiment, two or more sequences are analyzed and the sequence having the lowest GC content is selected. In an embodiment, off-target matches are determined in regulatory sequences of the organism. In an embodiment, the gene locus is a regulatory region. An aspect provides a dead guide RNA comprising the targeting sequence selected according to the aforementioned methods.

[0167] In an aspect, the invention provides a dead guide RNA for targeting a functionalized CRISPR system to a gene locus in an organism. In an embodiment of the invention, the dead guide RNA comprises a targeting sequence wherein the CG content of the target sequence is 70% or less, and the first 15 nt of the targeting sequence does not match an off-target sequence downstream from a CRISPR motif in the regulatory sequence of another gene locus in the organism. In certain embodiments, the GC content of the targeting sequence 60% or less, 55% or less, 50% or less, 45% or less, 40% or less, 35% or less or 30% or less. In certain embodiments, the GC content of the targeting sequence is from 70% to 60% or from 60% to 50% or from 50% to 40% or from 40% to 30%. In an embodiment, the targeting sequence has the lowest CG content among potential targeting sequences of the locus.

[0168] In an embodiment of the invention, the first 15 nt of the dead guide match the target sequence. In another embodiment, first 14 nt of the dead guide match the target sequence. In another embodiment, the first 13 nt of the dead guide match the target sequence. In another embodiment first 12 nt of the dead guide match the target sequence. In another embodiment, first 11 nt of the dead guide match the target sequence. In another embodiment, the first 10 nt of the dead guide match the target sequence. In an embodiment of the invention the first 15 nt of the dead guide does not match an off-target sequence downstream from a CRISPR motif in the regulatory region of another gene locus. In other embodiments, the first 14 nt, or the first 13 nt of the dead guide, or the first 12 nt of the guide, or the first 11 nt of the dead guide, or the first 10 nt of the dead guide, does not match an off-target sequence downstream from a CRISPR motif in the regulatory region of another gene locus. In other embodiments, the first 15 nt, or 14 nt, or 13 nt, or 12 nt, or 11 nt of the dead guide do not match an off-target sequence downstream from a CRISPR motif in the genome.

[0169] In certain embodiments, the dead guide RNA includes additional nucleotides at the 3′-end that do not match the target sequence. Thus, a dead guide RNA that includes the first 15 nt, or 14 nt, or 13 nt, or 12 nt, or 11 nt downstream of a CRISPR motif can be extended in length at the 3′ end to 12 nt, 13 nt, 14 nt, 15 nt, 16 nt, 17 nt, 18 nt, 19 nt, 20 nt, or longer.

[0170] The invention provides a method for directing a Cas13 CRISPR-Cas system, including but not limited to a dead Cas13 (dCas13) or functionalized Cas13 system (which may comprise a functionalized Cas13 or functionalized guide) to a gene locus. In an aspect, the invention provides a method for selecting a dead guide RNA targeting sequence and directing a functionalized CRISPR system to a gene locus in an organism. In an aspect, the invention provides a method for selecting a dead guide RNA targeting sequence and effecting gene regulation of a target gene locus by a functionalized Cas13 CRISPR-Cas system. In certain embodiments, the method is used to effect target gene regulation while minimizing off-target effects. In an aspect, the invention provides a method for selecting two or more dead guide RNA targeting sequences and effecting gene regulation of two or more target gene loci by a functionalized Cas13 CRISPR-Cas system. In certain embodiments, the method is used to effect regulation of two or more target gene loci while minimizing off-target effects.

[0171] In an aspect, the invention provides a method of selecting a dead guide RNA targeting sequence for directing a functionalized Cas13 to a gene locus in an organism, which comprises: a) locating one or more CRISPR motifs in the gene locus; b) analyzing the sequence downstream of each CRISPR motif by: i) selecting 10 to 15 nt adjacent to the CRISPR motif, ii) determining the GC content of the sequence; and c) selecting the 10 to 15 nt sequence as a targeting sequence for use in a guide RNA if the GC content of the sequence is 40% or more. In an embodiment, the sequence is selected if the GC content is 50% or more. In an embodiment, the sequence is selected if the GC content is 60% or more. In an embodiment, the sequence is selected if the GC content is 70% or more. In an embodiment, two or more sequences are analyzed and the sequence having the highest GC content is selected. In an embodiment, the method further comprises adding nucleotides to the 3′ end of the selected sequence which do not match the sequence downstream of the CRISPR motif. An aspect provides a dead guide RNA comprising the targeting sequence selected according to the aforementioned methods.

[0172] In an aspect, the invention provides a dead guide RNA for directing a functionalized CRISPR system to a gene locus in an organism wherein the targeting sequence of the dead guide RNA consists of 10 to 15 nucleotides adjacent to the CRISPR motif of the gene locus, wherein the CG content of the target sequence is 50% or more. In certain embodiments, the dead guide RNA further comprises nucleotides added to the 3′ end of the targeting sequence which do not match the sequence downstream of the CRISPR motif of the gene locus.

[0173] In an aspect, the invention provides for a single effector to be directed to one or more, or two or more gene loci. In certain embodiments, the effector is associated with a Cas13, and one or more, or two or more selected dead guide RNAs are used to direct the Cas13-associated effector to one or more, or two or more selected target gene loci. In certain embodiments, the effector is associated with one or more, or two or more selected dead guide RNAs, each selected dead guide RNA, when complexed with a Cas13 enzyme, causing its associated effector to localize to the dead guide RNA target. One non-limiting example of such CRISPR systems modulates activity of one or more, or two or more gene loci subject to regulation by the same transcription factor.

[0174] In an aspect, the invention provides for two or more effectors to be directed to one or more gene loci. In certain embodiments, two or more dead guide RNAs are employed, each of the two or more effectors being associated with a selected dead guide RNA, with each of the two or more effectors being localized to the selected target of its dead guide RNA. One non-limiting example of such CRISPR systems modulates activity of one or more, or two or more gene loci subject to regulation by different transcription factors. Thus, in one non-limiting embodiment, two or more transcription factors are localized to different regulatory sequences of a single gene. In another non-limiting embodiment, two or more transcription factors are localized to different regulatory sequences of different genes. In certain embodiments, one transcription factor is an activator. In certain embodiments, one transcription factor is an inhibitor. In certain embodiments, one transcription factor is an activator and another transcription factor is an inhibitor. In certain embodiments, gene loci expressing different components of the same regulatory pathway are regulated. In certain embodiments, gene loci expressing components of different regulatory pathways are regulated.

[0175] In an aspect, the invention also provides a method and algorithm for designing and selecting dead guide RNAs that are specific for target DNA cleavage or target binding and gene regulation mediated by an active Cas13 CRISPR-Cas system. In certain embodiments, the Cas13 CRISPR-Cas system provides orthogonal gene control using an active Cas13 which cleaves target DNA at one gene locus while at the same time binds to and promotes regulation of another gene locus.

[0176] In an aspect, the invention provides an method of selecting a dead guide RNA targeting sequence for directing a functionalized Cas13 to a gene locus in an organism, without cleavage, which comprises a) locating one or more CRISPR motifs in the gene locus; b) analyzing the sequence downstream of each CRISPR motif by i) selecting 10 to 15 nt adjacent to the CRISPR motif, ii) determining the GC content of the sequence, and c) selecting the 10 to 15 nt sequence as a targeting sequence for use in a dead guide RNA if the GC content of the sequence is 30% more, 40% or more. In certain embodiments, the GC content of the targeting sequence is 35% or more, 40% or more, 45% or more, 50% or more, 55% or more, 60% or more, 65% or more, or 70% or more. In certain embodiments, the GC content of the targeting sequence is from 30% to 40% or from 40% to 50% or from 50% to 60% or from 60% to 70%. In an embodiment of the invention, two or more sequences in a gene locus are analyzed and the sequence having the highest GC content is selected.

[0177] In an embodiment of the invention, the portion of the targeting sequence in which GC content is evaluated is 10 to 15 contiguous nucleotides of the 15 target nucleotides nearest to the PAM. In an embodiment of the invention, the portion of the guide in which GC content is considered is the 10 to 11 nucleotides or 11 to 12 nucleotides or 12 to 13 nucleotides or 13, or 14, or 15 contiguous nucleotides of the 15 nucleotides nearest to the PAM.

[0178] In an aspect, the invention further provides an algorithm for identifying dead guide RNAs which promote CRISPR system gene locus cleavage while avoiding functional activation or inhibition. It is observed that increased GC content in dead guide RNAs of 16 to 20 nucleotides coincides with increased DNA cleavage and reduced functional activation.

[0179] It is also demonstrated herein that efficiency of functionalized Cas13 can be increased by addition of nucleotides to the 3′ end of a guide RNA which do not match a target sequence downstream of the CRISPR motif. For example, of dead guide RNA 11 to 15 nt in length, shorter guides may be less likely to promote target cleavage, but are also less efficient at promoting CRISPR system binding and functional control. In certain embodiments, addition of nucleotides that don't match the target sequence to the 3′ end of the dead guide RNA increase activation efficiency while not increasing undesired target cleavage. In an aspect, the invention also provides a method and algorithm for identifying improved dead guide RNAs that effectively promote CRISPRP system function in DNA binding and gene regulation while not promoting DNA cleavage. Thus, in certain embodiments, the invention provides a dead guide RNA that includes the first 15 nt, or 14 nt, or 13 nt, or 12 nt, or 11 nt downstream of a CRISPR motif and is extended in length at the 3′ end by nucleotides that mismatch the target to 12 nt, 13 nt, 14 nt, 15 nt, 16 nt, 17 nt, 18 nt, 19 nt, 20 nt, or longer.

[0180] In an aspect, the invention provides a method for effecting selective orthogonal gene control. As will be appreciated from the disclosure herein, dead guide selection according to the invention, taking into account guide length and GC content, provides effective and selective transcription control by a functional Cas13 CRISPR-Cas system, for example to regulate transcription of a gene locus by activation or inhibition and minimize off-target effects. Accordingly, by providing effective regulation of individual target loci, the invention also provides effective orthogonal regulation of two or more target loci.

[0181] In certain embodiments, orthogonal gene control is by activation or inhibition of two or more target loci. In certain embodiments, orthogonal gene control is by activation or inhibition of one or more target locus and cleavage of one or more target locus.

[0182] In one aspect, the invention provides a cell comprising a non-naturally occurring Cas13 CRISPR-Cas system comprising one or more dead guide RNAs disclosed or made according to a method or algorithm described herein wherein the expression of one or more gene products has been altered. In an embodiment of the invention, the expression in the cell of two or more gene products has been altered. The invention also provides a cell line from such a cell.

[0183] In one aspect, the invention provides a multicellular organism comprising one or more cells comprising a non-naturally occurring Cas13 CRISPR-Cas system comprising one or more dead guide RNAs disclosed or made according to a method or algorithm described herein. In one aspect, the invention provides a product from a cell, cell line, or multicellular organism comprising a non-naturally occurring Cas13 CRISPR-Cas system comprising one or more dead guide RNAs disclosed or made according to a method or algorithm described herein.

[0184] A further aspect of this invention is the use of gRNA comprising dead guide(s) as described herein, optionally in combination with gRNA comprising guide(s) as described herein or in the state of the art, in combination with systems e.g. cells, transgenic animals, transgenic mice, inducible transgenic animals, inducible transgenic mice) which are engineered for either overexpression of Cas13 or preferably knock in Cas13. As a result a single system (e.g. transgenic animal, cell) can serve as a basis for multiplex gene modifications in systems/network biology. On account of the dead guides, this is now possible in both in vitro, ex vivo, and in vivo.

[0185] For example, once the Cas13 is provided for, one or more dead gRNAs may be provided to direct multiplex gene regulation, and preferably multiplex bidirectional gene regulation. The one or more dead gRNAs may be provided in a spatially and temporally appropriate manner if necessary or desired (for example tissue specific induction of Cas13 expression). On account that the transgenic/inducible Cas13 is provided for (e.g. expressed) in the cell, tissue, animal of interest, both gRNAs comprising dead guides or gRNAs comprising guides are equally effective. In the same manner, a further aspect of this invention is the use of gRNA comprising dead guide(s) as described herein, optionally in combination with gRNA comprising guide(s) as described herein or in the state of the art, in combination with systems (e.g. cells, transgenic animals, transgenic mice, inducible transgenic animals, inducible transgenic mice) which are engineered for knockout Cas13 CRISPR-Cas.

[0186] As a result, the combination of dead guides as described herein with CRISPR applications described herein and CRISPR applications known in the art results in a highly efficient and accurate means for multiplex screening of systems (e.g. network biology). Such screening allows, for example, identification of specific combinations of gene activities for identifying genes responsible for diseases (e.g. on/off combinations), in particular gene related diseases. A preferred application of such screening is cancer. In the same manner, screening for treatment for such diseases is included in the invention. Cells or animals may be exposed to aberrant conditions resulting in disease or disease like effects. Candidate compositions may be provided and screened for an effect in the desired multiplex environment. For example a patient's cancer cells may be screened for which gene combinations will cause them to die, and then use this information to establish appropriate therapies.

[0187] In one aspect, the invention provides a kit comprising one or more of the components described herein. The kit may include dead guides as described herein with or without guides as described herein.

[0188] The structural information provided herein allows for interrogation of dead gRNA interaction with the target DNA and the Cas13 permitting engineering or alteration of dead gRNA structure to optimize functionality of the entire Cas13 CRISPR-Cas system. For example, loops of the dead gRNA may be extended, without colliding with the Cas13 protein by the insertion of adaptor proteins that can bind to RNA. These adaptor proteins can further recruit effector proteins or fusions which comprise one or more functional domains.

[0189] In some preferred embodiments, the functional domain is a transcriptional activation domain, preferably VP64. In some embodiments, the functional domain is a transcription repression domain, preferably KRAB. In some embodiments, the transcription repression domain is SID, or concatemers of SID (e.g. SID4X). In some embodiments, the functional domain is an epigenetic modifying domain, such that an epigenetic modifying enzyme is provided. In some embodiments, the functional domain is an activation domain, which may be the P65 activation domain.

[0190] An aspect of the invention is that the above elements are comprised in a single composition or comprised in individual compositions. These compositions may advantageously be applied to a host to elicit a functional effect on the genomic level.

[0191] In general, the dead gRNA are modified in a manner that provides specific binding sites (e.g. aptamers) for adapter proteins comprising one or more functional domains (e.g. via fusion protein) to bind to. The modified dead gRNA are modified such that once the dead gRNA forms a CRISPR complex (i.e. Cas13 binding to dead gRNA and target) the adapter proteins bind and, the functional domain on the adapter protein is positioned in a spatial orientation which is advantageous for the attributed function to be effective. For example, if the functional domain is a transcription activator (e.g. VP64 or p65), the transcription activator is placed in a spatial orientation which allows it to affect the transcription of the target. Likewise, a transcription repressor will be advantageously positioned to affect the transcription of the target and a nuclease (e.g. Fok1) will be advantageously positioned to cleave or partially cleave the target.

[0192] The skilled person will understand that modifications to the dead gRNA which allow for binding of the adapter+functional domain but not proper positioning of the adapter+functional domain (e.g. due to steric hindrance within the three dimensional structure of the CRISPR complex) are modifications which are not intended. The one or more modified dead gRNA may be modified at the tetra loop, the stem loop 1, stem loop 2, or stem loop 3, as described herein, preferably at either the tetra loop or stem loop 2, and most preferably at both the tetra loop and stem loop 2.

[0193] As explained herein the functional domains may be, for example, one or more domains from the group consisting of methylase activity, demethylase activity, transcription activation activity, transcription repression activity, transcription release factor activity, histone modification activity, RNA cleavage activity, DNA cleavage activity, nucleic acid binding activity, and molecular switches (e.g. light inducible). In some cases it is advantageous that additionally at least one NLS is provided. In some instances, it is advantageous to position the NLS at the N terminus. When more than one functional domain is included, the functional domains may be the same or different.

[0194] The dead gRNA may be designed to include multiple binding recognition sites (e.g. aptamers) specific to the same or different adapter protein. The dead gRNA may be designed to bind to the promoter region −1000-+1 nucleic acids upstream of the transcription start site (i.e. TSS), preferably −200 nucleic acids. This positioning improves functional domains which affect gene activation (e.g. transcription activators) or gene inhibition (e.g. transcription repressors). The modified dead gRNA may be one or more modified dead gRNAs targeted to one or more target loci (e.g. at least 1 gRNA, at least 2 gRNA, at least 5 gRNA, at least 10 gRNA, at least 20 gRNA, at least 30 gRNA, at least 50 gRNA) comprised in a composition.

[0195] The adaptor protein may be any number of proteins that binds to an aptamer or recognition site introduced into the modified dead gRNA and which allows proper positioning of one or more functional domains, once the dead gRNA has been incorporated into the CRISPR complex, to affect the target with the attributed function. As explained in detail in this application such may be coat proteins, preferably bacteriophage coat proteins. The functional domains associated with such adaptor proteins (e.g. in the form of fusion protein) may include, for example, one or more domains from the group consisting of methylase activity, demethylase activity, transcription activation activity, transcription repression activity, transcription release factor activity, histone modification activity, RNA cleavage activity, DNA cleavage activity, nucleic acid binding activity, and molecular switches (e.g. light inducible). Preferred domains are Fok1, VP64, P65, HSF1, MyoD1. In the event that the functional domain is a transcription activator or transcription repressor it is advantageous that additionally at least an NLS is provided and preferably at the N terminus. When more than one functional domain is included, the functional domains may be the same or different. The adaptor protein may utilize known linkers to attach such functional domains.

[0196] Thus, the modified dead gRNA, the (inactivated) Cas13 (with or without functional domains), and the binding protein with one or more functional domains, may each individually be comprised in a composition and administered to a host individually or collectively. Alternatively, these components may be provided in a single composition for administration to a host. Administration to a host may be performed via viral vectors known to the skilled person or described herein for delivery to a host (e.g. lentiviral vector, adenoviral vector, AAV vector). As explained herein, use of different selection markers (e.g. for lentiviral gRNA selection) and concentration of gRNA (e.g. dependent on whether multiple gRNAs are used) may be advantageous for eliciting an improved effect.

[0197] On the basis of this concept, several variations are appropriate to elicit a genomic locus event, including DNA cleavage, gene activation, or gene deactivation. Using the provided compositions, the person skilled in the art can advantageously and specifically target single or multiple loci with the same or different functional domains to elicit one or more genomic locus events. The compositions may be applied in a wide variety of methods for screening in libraries in cells and functional modeling in vivo (e.g. gene activation of lincRNA and identification of function; gain-of-function modeling; loss-of-function modeling; the use the compositions of the invention to establish cell lines and transgenic animals for optimization and screening purposes).

[0198] The current invention comprehends the use of the compositions of the current invention to establish and utilize conditional or inducible CRISPR transgenic cell/animals, which are not believed prior to the present invention or application. For example, the target cell comprises Cas13 conditionally or inducibly (e.g. in the form of Cre dependent constructs) and/or the adapter protein conditionally or inducibly and, on expression of a vector introduced into the target cell, the vector expresses that which induces or gives rise to the condition of Cas13 expression and/or adaptor expression in the target cell. By applying the teaching and compositions of the current invention with the known method of creating a CRISPR complex, inducible genomic events affected by functional domains are also an aspect of the current invention. One example of this is the creation of a CRISPR knock-in/conditional transgenic animal (e.g. mouse comprising e.g. a Lox-Stop-polyA-Lox(LSL) cassette) and subsequent delivery of one or more compositions providing one or more modified dead gRNA (e.g. −200 nucleotides to TSS of a target gene of interest for gene activation purposes) as described herein (e.g. modified dead gRNA with one or more aptamers recognized by coat proteins, e.g. MS2), one or more adapter proteins as described herein (MS2 binding protein linked to one or more VP64) and means for inducing the conditional animal (e.g. Cre recombinase for rendering Cas13 expression inducible). Alternatively, the adaptor protein may be provided as a conditional or inducible element with a conditional or inducible Cas13 to provide an effective model for screening purposes, which advantageously only requires minimal design and administration of specific dead gRNAs for a broad number of applications.

[0199] In another aspect the dead guides are further modified to improve specificity. Protected dead guides may be synthesized, whereby secondary structure is introduced into the 3′ end of the dead guide to improve its specificity. A protected guide RNA (pgRNA) comprises a guide sequence capable of hybridizing to a target sequence in a genomic locus of interest in a cell and a protector strand, wherein the protector strand is optionally complementary to the guide sequence and wherein the guide sequence may in part be hybridizable to the protector strand. The pgRNA optionally includes an extension sequence. The thermodynamics of the pgRNA-target DNA hybridization is determined by the number of bases complementary between the guide RNA and target DNA. By employing ‘thermodynamic protection’, specificity of dead gRNA can be improved by adding a protector sequence. For example, one method adds a complementary protector strand of varying lengths to the 3′ end of the guide sequence within the dead gRNA. As a result, the protector strand is bound to at least a portion of the dead gRNA and provides for a protected gRNA (pgRNA). In turn, the dead gRNA references herein may be easily protected using the described embodiments, resulting in pgRNA. The protector strand can be either a separate RNA transcript or strand or a chimeric version joined to the 3′ end of the dead gRNA guide sequence.

### ***Tandem Guides and Uses in a Multiplex (Tandem) Targeting Approach

[0200] The inventors have shown that CRISPR enzymes as defined herein can employ more than one RNA guide without losing activity. This enables the use of the CRISPR enzymes, systems or complexes as defined herein for targeting multiple DNA targets, genes or gene loci, with a single enzyme, system or complex as defined herein. The guide RNAs may be tandemly arranged, optionally separated by a nucleotide sequence such as a direct repeat as defined herein. The position of the different guide RNAs is the tandem does not influence the activity. It is noted that the terms “CRISPR-Cas system”, “CRISP-Cas complex” “CRISPR complex” and “CRISPR system” are used interchangeably. Also the terms “CRISPR enzyme”, “Cas enzyme”, or “CRISPR-Cas enzyme”, can be used interchangeably. In preferred embodiments, said CRISPR enzyme, CRISP-Cas enzyme or Cas enzyme is Cas13, or any one of the modified or mutated variants thereof described herein elsewhere.

[0201] In one aspect, the invention provides a non-naturally occurring or engineered CRISPR enzyme, preferably a class 2 CRISPR enzyme, preferably a Type V or VI CRISPR enzyme as described herein, such as without limitation Cas13 as described herein elsewhere, used for tandem or multiplex targeting. It is to be understood that any of the CRISPR (or CRISPR-Cas or Cas) enzymes, complexes, or systems according to the invention as described herein elsewhere may be used in such an approach. Any of the methods, products, compositions and uses as described herein elsewhere are equally applicable with the multiplex or tandem targeting approach further detailed below. By means of further guidance, the following particular aspects and embodiments are provided.

[0202] In one aspect, the invention provides for the use of a Cas13 enzyme, complex or system as defined herein for targeting multiple gene loci. In one embodiment, this can be established by using multiple (tandem or multiplex) guide RNA (gRNA) sequences.

[0203] In one aspect, the invention provides methods for using one or more elements of a Cas13 enzyme, complex or system as defined herein for tandem or multiplex targeting, wherein said CRISP system comprises multiple guide RNA sequences. Preferably, said gRNA sequences are separated by a nucleotide sequence, such as a direct repeat as defined herein elsewhere.

[0204] The Cas13 enzyme, system or complex as defined herein provides an effective means for modifying multiple target polynucleotides. The Cas13 enzyme, system or complex as defined herein has a wide variety of utility including modifying (e.g., deleting, inserting, translocating, inactivating, activating) one or more target polynucleotides in a multiplicity of cell types. As such the Cas13 enzyme, system or complex as defined herein of the invention has a broad spectrum of applications in, e.g., gene therapy, drug screening, disease diagnosis, and prognosis, including targeting multiple gene loci within a single CRISPR system.

[0205] In one aspect, the invention provides a Cas13 enzyme, system or complex as defined herein, i.e. a Cas13 CRISPR-Cas complex having a Cas13 protein having at least one destabilization domain associated therewith, and multiple guide RNAs that target multiple nucleic acid molecules such as DNA molecules, whereby each of said multiple guide RNAs specifically targets its corresponding nucleic acid molecule, e.g., DNA molecule. Each nucleic acid molecule target, e.g., DNA molecule can encode a gene product or encompass a gene locus. Using multiple guide RNAs hence enables the targeting of multiple gene loci or multiple genes. In some embodiments the Cas13 enzyme may cleave the DNA molecule encoding the gene product. In some embodiments expression of the gene product is altered. The Cas13 protein and the guide RNAs do not naturally occur together. The invention comprehends the guide RNAs comprising tandemly arranged guide sequences. The invention further comprehends coding sequences for the Cas13 protein being codon optimized for expression in a eukaryotic cell. In a preferred embodiment the eukaryotic cell is a mammalian cell, a plant cell or a yeast cell and in a more preferred embodiment the mammalian cell is a human cell. Expression of the gene product may be decreased. The Cas13 enzyme may form part of a CRISPR system or complex, which further comprises tandemly arranged guide RNAs (gRNAs) comprising a series of 2, 3, 4, 5, 6, 7, 8, 9, 10, 15, 25, 25, 30, or more than 30 guide sequences, each capable of specifically hybridizing to a target sequence in a genomic locus of interest in a cell. In some embodiments, the functional Cas13 CRISPR system or complex binds to the multiple target sequences. In some embodiments, the functional CRISPR system or complex may edit the multiple target sequences, e.g., the target sequences may comprise a genomic locus, and in some embodiments there may be an alteration of gene expression. In some embodiments, the functional CRISPR system or complex may comprise further functional domains. In some embodiments, the invention provides a method for altering or modifying expression of multiple gene products. The method may comprise introducing into a cell containing said target nucleic acids, e.g., DNA molecules, or containing and expressing target nucleic acid, e.g., DNA molecules; for instance, the target nucleic acids may encode gene products or provide for expression of gene products (e.g., regulatory sequences).

[0206] In some general embodiments, the Cas13 enzyme used for multiplex targeting is associated with one or more functional domains. In some more specific embodiments, the CRISPR enzyme used for multiplex targeting is a deadCas13 as defined herein elsewhere.

[0207] In an aspect, the present invention provides a means for delivering the Cas13 enzyme, system or complex for use in multiple targeting as defined herein or the polynucleotides defined herein. Non-limiting examples of such delivery means are e.g. particle(s) delivering component(s) of the complex, vector(s) comprising the polynucleotide(s) discussed herein (e.g., encoding the CRISPR enzyme, providing the nucleotides encoding the CRISPR complex). In some embodiments, the vector may be a plasmid or a viral vector such as AAV, or lentivirus. Transient transfection with plasmids, e.g., into HEK cells may be advantageous, especially given the size limitations of AAV and that while Cas13 fits into AAV, one may reach an upper limit with additional guide RNAs.

[0208] Also provided is a model that constitutively expresses the Cas13 enzyme, complex or system as used herein for use in multiplex targeting. The organism may be transgenic and may have been transfected with the present vectors or may be the offspring of an organism so transfected. In a further aspect, the present invention provides compositions comprising the CRISPR enzyme, system and complex as defined herein or the polynucleotides or vectors described herein. Also provides are Cas13 CRISPR systems or complexes comprising multiple guide RNAs, preferably in a tandemly arranged format. Said different guide RNAs may be separated by nucleotide sequences such as direct repeats.

[0209] Also provided is a method of treating a subject, e.g., a subject in need thereof, comprising inducing gene editing by transforming the subject with the polynucleotide encoding the Cas13 CRISPR system or complex or any of polynucleotides or vectors described herein and administering them to the subject. A suitable repair template may also be provided, for example delivered by a vector comprising said repair template. Also provided is a method of treating a subject, e.g., a subject in need thereof, comprising inducing transcriptional activation or repression of multiple target gene loci by transforming the subject with the polynucleotides or vectors described herein, wherein said polynucleotide or vector encodes or comprises the Cas13 enzyme, complex or system comprising multiple guide RNAs, preferably tandemly arranged. Where any treatment is occurring ex vivo, for example in a cell culture, then it will be appreciated that the term ‘subject’ may be replaced by the phrase “cell or cell culture.”

[0210] Compositions comprising Cas13 enzyme, complex or system comprising multiple guide RNAs, preferably tandemly arranged, or the polynucleotide or vector encoding or comprising said Cas13 enzyme, complex or system comprising multiple guide RNAs, preferably tandemly arranged, for use in the methods of treatment as defined herein elsewhere are also provided. A kit of parts may be provided including such compositions. Use of said composition in the manufacture of a medicament for such methods of treatment are also provided. Use of a Cas13 CRISPR system in screening is also provided by the present invention, e.g., gain of function screens. Cells which are artificially forced to overexpress a gene are be able to down regulate the gene over time (re-establishing equilibrium) e.g. by negative feedback loops. By the time the screen starts the unregulated gene might be reduced again. Using an inducible Cas13 activator allows one to induce transcription right before the screen and therefore minimizes the chance of false negative hits. Accordingly, by use of the instant invention in screening, e.g., gain of function screens, the chance of false negative results may be minimized.

[0211] In one aspect, the invention provides an engineered, non-naturally occurring CRISPR system comprising a Cas13 protein and multiple guide RNAs that each specifically target a DNA molecule encoding a gene product in a cell, whereby the multiple guide RNAs each target their specific DNA molecule encoding the gene product and the Cas13 protein cleaves the target DNA molecule encoding the gene product, whereby expression of the gene product is altered; and, wherein the CRISPR protein and the guide RNAs do not naturally occur together. The invention comprehends the multiple guide RNAs comprising multiple guide sequences, preferably separated by a nucleotide sequence such as a direct repeat and optionally fused to a tracr sequence. In an embodiment of the invention the CRISPR protein is a type V or VI CRISPR-Cas protein and in a more preferred embodiment the CRISPR protein is a Cas13 protein. The invention further comprehends a Cas13 protein being codon optimized for expression in a eukaryotic cell. In a preferred embodiment the eukaryotic cell is a mammalian cell and in a more preferred embodiment the mammalian cell is a human cell. In a further embodiment of the invention, the expression of the gene product is decreased.

[0212] In another aspect, the invention provides an engineered, non-naturally occurring vector system comprising one or more vectors comprising a first regulatory element operably linked to the multiple Cas13 CRISPR system guide RNAs that each specifically target a DNA molecule encoding a gene product and a second regulatory element operably linked coding for a CRISPR protein. Both regulatory elements may be located on the same vector or on different vectors of the system. The multiple guide RNAs target the multiple DNA molecules encoding the multiple gene products in a cell and the CRISPR protein may cleave the multiple DNA molecules encoding the gene products (it may cleave one or both strands or have substantially no nuclease activity), whereby expression of the multiple gene products is altered; and, wherein the CRISPR protein and the multiple guide RNAs do not naturally occur together. In a preferred embodiment the CRISPR protein is Cas13 protein, optionally codon optimized for expression in a eukaryotic cell. In a preferred embodiment the eukaryotic cell is a mammalian cell, a plant cell or a yeast cell and in a more preferred embodiment the mammalian cell is a human cell. In a further embodiment of the invention, the expression of each of the multiple gene products is altered, preferably decreased.

[0213] In one aspect, the invention provides a vector system comprising one or more vectors. In some embodiments, the system comprises: (a) a first regulatory element operably linked to a direct repeat sequence and one or more insertion sites for inserting one or more guide sequences up- or downstream (whichever applicable) of the direct repeat sequence, wherein when expressed, the one or more guide sequence(s) direct(s) sequence-specific binding of the CRISPR complex to the one or more target sequence(s) in a eukaryotic cell, wherein the CRISPR complex comprises a Cas13 enzyme complexed with the one or more guide sequence(s) that is hybridized to the one or more target sequence(s); and (b) a second regulatory element operably linked to an enzyme-coding sequence encoding said Cas13 enzyme, preferably comprising at least one nuclear localization sequence and/or at least one NES; wherein components (a) and (b) are located on the same or different vectors of the system. Where applicable, a tracr sequence may also be provided. In some embodiments, component (a) further comprises two or more guide sequences operably linked to the first regulatory element, wherein when expressed, each of the two or more guide sequences direct sequence specific binding of a Cas13 CRISPR complex to a different target sequence in a eukaryotic cell. In some embodiments, the CRISPR complex comprises one or more nuclear localization sequences and/or one or more NES of sufficient strength to drive accumulation of said Cas13 CRISPR complex in a detectable amount in or out of the nucleus of a eukaryotic cell. In some embodiments, the first regulatory element is a polymerase III promoter. In some embodiments, the second regulatory element is a polymerase II promoter. In some embodiments, each of the guide sequences is at least 16, 17, 18, 19, 20, 25 nucleotides, or between 16-30, or between 16-25, or between 16-20 nucleotides in length.

[0214] Recombinant expression vectors can comprise the polynucleotides encoding the Cas13 enzyme, system or complex for use in multiple targeting as defined herein in a form suitable for expression of the nucleic acid in a host cell, which means that the recombinant expression vectors include one or more regulatory elements, which may be selected on the basis of the host cells to be used for expression, that is operatively-linked to the nucleic acid sequence to be expressed. Within a recombinant expression vector, “operably linked” is intended to mean that the nucleotide sequence of interest is linked to the regulatory element(s) in a manner that allows for expression of the nucleotide sequence (e.g., in an in vitro transcription/translation system or in a host cell when the vector is introduced into the host cell).

[0215] In some embodiments, a host cell is transiently or non-transiently transfected with one or more vectors comprising the polynucleotides encoding the Cas13 enzyme, system or complex for use in multiple targeting as defined herein. In some embodiments, a cell is transfected as it naturally occurs in a subject. In some embodiments, a cell that is transfected is taken from a subject. In some embodiments, the cell is derived from cells taken from a subject, such as a cell line. A wide variety of cell lines for tissue culture are known in the art and exemplified herein elsewhere. Cell lines are available from a variety of sources known to those with skill in the art (see, e.g., the American Type Culture Collection (ATCC) (Manassas, Va.)). In some embodiments, a cell transfected with one or more vectors comprising the polynucleotides encoding the Cas13 enzyme, system or complex for use in multiple targeting as defined herein is used to establish a new cell line comprising one or more vector-derived sequences. In some embodiments, a cell transiently transfected with the components of a Cas13 CRISPR system or complex for use in multiple targeting as described herein (such as by transient transfection of one or more vectors, or transfection with RNA), and modified through the activity of a Cas13 CRISPR system or complex, is used to establish a new cell line comprising cells containing the modification but lacking any other exogenous sequence. In some embodiments, cells transiently or non-transiently transfected with one or more vectors comprising the polynucleotides encoding the Cas13 enzyme, system or complex for use in multiple targeting as defined herein, or cell lines derived from such cells are used in assessing one or more test compounds.

[0216] The term “regulatory element” is as defined herein elsewhere.

[0217] Advantageous vectors include lentiviruses and adeno-associated viruses, and types of such vectors can also be selected for targeting particular types of cells.

[0218] In one aspect, the invention provides a eukaryotic host cell comprising (a) a first regulatory element operably linked to a direct repeat sequence and one or more insertion sites for inserting one or more guide RNA sequences up- or downstream (whichever applicable) of the direct repeat sequence, wherein when expressed, the guide sequence(s) direct(s) sequence-specific binding of the Cas13 CRISPR complex to the respective target sequence(s) in a eukaryotic cell, wherein the Cas13 CRISPR complex comprises a Cas13 enzyme complexed with the one or more guide sequence(s) that is hybridized to the respective target sequence(s); and/or (b) a second regulatory element operably linked to an enzyme-coding sequence encoding said Cas13 enzyme comprising preferably at least one nuclear localization sequence and/or NES. In some embodiments, the host cell comprises components (a) and (b). Where applicable, a tracr sequence may also be provided. In some embodiments, component (a), component (b), or components (a) and (b) are stably integrated into a genome of the host eukaryotic cell. In some embodiments, component (a) further comprises two or more guide sequences operably linked to the first regulatory element, and optionally separated by a direct repeat, wherein when expressed, each of the two or more guide sequences direct sequence specific binding of a Cas13 CRISPR complex to a different target sequence in a eukaryotic cell. In some embodiments, the Cas13 enzyme comprises one or more nuclear localization sequences and/or nuclear export sequences or NES of sufficient strength to drive accumulation of said CRISPR enzyme in a detectable amount in and/or out of the nucleus of a eukaryotic cell.

[0219] In some embodiments, the Cas13 enzyme is a type V or VI CRISPR system enzyme. In some embodiments, the Cas13 enzyme is a Cas13 enzyme. In some embodiments, the Cas13 enzyme is derived from Francisella tularensis 1, Francisella tularensis subsp. novicida, Prevotella albensis, Lachnospiraceae bacterium MC2017 1, Butyrivibrio proteoclasticus, Peregrinibacteria bacterium GW2011_GWA2_33_10, Parcubacteria bacterium GW2011_GWC2_44_17, Smithella sp. SCADC, Acidaminococcus sp. BV3L6, Lachnospiraceae bacterium MA2020, Candidatus Methanoplasma termitum, Eubacterium eligens, Moraxella bovoculi 237, Leptospira inadai, Lachnospiraceae bacterium ND2006, Porphyromonas crevioricanis 3, Prevotella disiens, or Porphyromonas macacae Cas13, and may include further alterations or mutations of the Cas13 as defined herein elsewhere, and can be a chimeric Cas13. In some embodiments, the Cas13 enzyme is codon-optimized for expression in a eukaryotic cell. In some embodiments, the CRISPR enzyme directs cleavage of one or two strands at the location of the target sequence. In some embodiments, the first regulatory element is a polymerase III promoter. In some embodiments, the second regulatory element is a polymerase II promoter. In some embodiments, the one or more guide sequence(s) is (are each) at least 16, 17, 18, 19, 20, 25 nucleotides, or between 16-30, or between 16-25, or between 16-20 nucleotides in length. When multiple guide RNAs are used, they are preferably separated by a direct repeat sequence. In an aspect, the invention provides a non-human eukaryotic organism; preferably a multicellular eukaryotic organism, comprising a eukaryotic host cell according to any of the described embodiments. In other aspects, the invention provides a eukaryotic organism; preferably a multicellular eukaryotic organism, comprising a eukaryotic host cell according to any of the described embodiments. The organism in some embodiments of these aspects may be an animal; for example a mammal. Also, the organism may be an arthropod such as an insect. The organism also may be a plant. Further, the organism may be a fungus.

[0220] In one aspect, the invention provides a kit comprising one or more of the components described herein. In some embodiments, the kit comprises a vector system and instructions for using the kit. In some embodiments, the vector system comprises (a) a first regulatory element operably linked to a direct repeat sequence and one or more insertion sites for inserting one or more guide sequences up- or downstream (whichever applicable) of the direct repeat sequence, wherein when expressed, the guide sequence directs sequence-specific binding of a Cas13 CRISPR complex to a target sequence in a eukaryotic cell, wherein the Cas13 CRISPR complex comprises a Cas13 enzyme complexed with the guide sequence that is hybridized to the target sequence; and/or (b) a second regulatory element operably linked to an enzyme-coding sequence encoding said Cas13 enzyme comprising a nuclear localization sequence. Where applicable, a tracr sequence may also be provided. In some embodiments, the kit comprises components (a) and (b) located on the same or different vectors of the system. In some embodiments, component (a) further comprises two or more guide sequences operably linked to the first regulatory element, wherein when expressed, each of the two or more guide sequences direct sequence specific binding of a CRISPR complex to a different target sequence in a eukaryotic cell. In some embodiments, the Cas13 enzyme comprises one or more nuclear localization sequences of sufficient strength to drive accumulation of said CRISPR enzyme in a detectable amount in the nucleus of a eukaryotic cell. In some embodiments, the CRISPR enzyme is a type V or VI CRISPR system enzyme. In some embodiments, the CRISPR enzyme is a Cas13 enzyme. In some embodiments, the Cas13 enzyme is derived from Francisella tularensis 1, Francisella tularensis subsp. novicida, Prevotella albensis, Lachnospiraceae bacterium MC2017 1, Butyrivibrio proteoclasticus, Peregrinibacteria bacterium GW2011_GWA2_33_10, Parcubacteria bacterium GW2011_GWC2_44_17, Smithella sp. SCADC, Acidaminococcus sp. BV3L6, Lachnospiraceae bacterium MA2020, Candidatus Methanoplasma termitum, Eubacterium eligens, Moraxella bovoculi 237, Leptospira inadai, Lachnospiraceae bacterium ND2006, Porphyromonas crevioricanis 3, Prevotella disiens, or Porphyromonas macacae Cas13 (e.g., modified to have or be associated with at least one DD), and may include further alteration or mutation of the Cas13, and can be a chimeric Cas13. In some embodiments, the DD-CRISPR enzyme is codon-optimized for expression in a eukaryotic cell. In some embodiments, the DD-CRISPR enzyme directs cleavage of one or two strands at the location of the target sequence. In some embodiments, the DD-CRISPR enzyme lacks or substantially DNA strand cleavage activity (e.g., no more than 5% nuclease activity as compared with a wild type enzyme or enzyme not having the mutation or alteration that decreases nuclease activity). In some embodiments, the first regulatory element is a polymerase III promoter. In some embodiments, the second regulatory element is a polymerase II promoter. In some embodiments, the guide sequence is at least 16, 17, 18, 19, 20, 25 nucleotides, or between 16-30, or between 16-25, or between 16-20 nucleotides in length.

[0221] In one aspect, the invention provides a method of modifying multiple target polynucleotides in a host cell such as a eukaryotic cell. In some embodiments, the method comprises allowing a Cas13CRISPR complex to bind to multiple target polynucleotides, e.g., to effect cleavage of said multiple target polynucleotides, thereby modifying multiple target polynucleotides, wherein the Cas13CRISPR complex comprises a Cas13 enzyme complexed with multiple guide sequences each of the being hybridized to a specific target sequence within said target polynucleotide, wherein said multiple guide sequences are linked to a direct repeat sequence. Where applicable, a tracr sequence may also be provided (e.g. to provide a single guide RNA, sgRNA). In some embodiments, said cleavage comprises cleaving one or two strands at the location of each of the target sequence by said Cas13 enzyme. In some embodiments, said cleavage results in decreased transcription of the multiple target genes. In some embodiments, the method further comprises repairing one or more of said cleaved target polynucleotide by homologous recombination with an exogenous template polynucleotide, wherein said repair results in a mutation comprising an insertion, deletion, or substitution of one or more nucleotides of one or more of said target polynucleotides. In some embodiments, said mutation results in one or more amino acid changes in a protein expressed from a gene comprising one or more of the target sequence(s). In some embodiments, the method further comprises delivering one or more vectors to said eukaryotic cell, wherein the one or more vectors drive expression of one or more of: the Cas13 enzyme and the multiple guide RNA sequence linked to a direct repeat sequence. Where applicable, a tracr sequence may also be provided. In some embodiments, said vectors are delivered to the eukaryotic cell in a subject. In some embodiments, said modifying takes place in said eukaryotic cell in a cell culture. In some embodiments, the method further comprises isolating said eukaryotic cell from a subject prior to said modifying. In some embodiments, the method further comprises returning said eukaryotic cell and/or cells derived therefrom to said subject.

[0222] In one aspect, the invention provides a method of modifying expression of multiple polynucleotides in a eukaryotic cell. In some embodiments, the method comprises allowing a Cas13 CRISPR complex to bind to multiple polynucleotides such that said binding results in increased or decreased expression of said polynucleotides; wherein the Cas13 CRISPR complex comprises a Cas13 enzyme complexed with multiple guide sequences each specifically hybridized to its own target sequence within said polynucleotide, wherein said guide sequences are linked to a direct repeat sequence. Where applicable, a tracr sequence may also be provided. In some embodiments, the method further comprises delivering one or more vectors to said eukaryotic cells, wherein the one or more vectors drive expression of one or more of: the Cas13 enzyme and the multiple guide sequences linked to the direct repeat sequences. Where applicable, a tracr sequence may also be provided.

[0223] In one aspect, the invention provides a recombinant polynucleotide comprising multiple guide RNA sequences up- or downstream (whichever applicable) of a direct repeat sequence, wherein each of the guide sequences when expressed directs sequence-specific binding of a Cas13CRISPR complex to its corresponding target sequence present in a eukaryotic cell. In some embodiments, the target sequence is a viral sequence present in a eukaryotic cell. Where applicable, a tracr sequence may also be provided. In some embodiments, the target sequence is a proto-oncogene or an oncogene.

[0224] Aspects of the invention encompass a non-naturally occurring or engineered composition that may comprise a guide RNA (gRNA) comprising a guide sequence capable of hybridizing to a target sequence in a genomic locus of interest in a cell and a Cas13 enzyme as defined herein that may comprise at least one or more nuclear localization sequences.

[0225] An aspect of the invention encompasses methods of modifying a genomic locus of interest to change gene expression in a cell by introducing into the cell any of the compositions described herein.

[0226] An aspect of the invention is that the above elements are comprised in a single composition or comprised in individual compositions. These compositions may advantageously be applied to a host to elicit a functional effect on the genomic level.

[0227] As used herein, the term “guide RNA” or “gRNA” has the leaning as used herein elsewhere and comprises any polynucleotide sequence having sufficient complementarity with a target nucleic acid sequence to hybridize with the target nucleic acid sequence and direct sequence-specific binding of a nucleic acid-targeting complex to the target nucleic acid sequence. Each gRNA may be designed to include multiple binding recognition sites (e.g., aptamers) specific to the same or different adapter protein. Each gRNA may be designed to bind to the promoter region −1000-+1 nucleic acids upstream of the transcription start site (i.e. TSS), preferably −200 nucleic acids. This positioning improves functional domains which affect gene activation (e.g., transcription activators) or gene inhibition (e.g., transcription repressors). The modified gRNA may be one or more modified gRNAs targeted to one or more target loci (e.g., at least 1 gRNA, at least 2 gRNA, at least 5 gRNA, at least 10 gRNA, at least 20 gRNA, at least 30 g RNA, at least 50 gRNA) comprised in a composition. Said multiple gRNA sequences can be tandemly arranged and are preferably separated by a direct repeat.

[0228] Thus, gRNA, the CRISPR enzyme as defined herein may each individually be comprised in a composition and administered to a host individually or collectively. Alternatively, these components may be provided in a single composition for administration to a host. Administration to a host may be performed via viral vectors known to the skilled person or described herein for delivery to a host (e.g., lentiviral vector, adenoviral vector, AAV vector). As explained herein, use of different selection markers (e.g., for lentiviral sgRNA selection) and concentration of gRNA (e.g., dependent on whether multiple gRNAs are used) may be advantageous for eliciting an improved effect. On the basis of this concept, several variations are appropriate to elicit a genomic locus event, including DNA cleavage, gene activation, or gene deactivation. Using the provided compositions, the person skilled in the art can advantageously and specifically target single or multiple loci with the same or different functional domains to elicit one or more genomic locus events. The compositions may be applied in a wide variety of methods for screening in libraries in cells and functional modeling in vivo (e.g., gene activation of lincRNA and identification of function; gain-of-function modeling; loss-of-function modeling; the use the compositions of the invention to establish cell lines and transgenic animals for optimization and screening purposes).

[0229] The current invention comprehends the use of the compositions of the current invention to establish and utilize conditional or inducible CRISPR transgenic cell/animals; see, e.g., Platt et al., Cell (2014), 159(2): 440-455, or PCT patent publications cited herein, such as WO 2014/093622 (PCT/US2013/074667). For example, cells or animals such as non-human animals, e.g., vertebrates or mammals, such as rodents, e.g., mice, rats, or other laboratory or field animals, e.g., cats, dogs, sheep, etc., may be ‘knock-in’ whereby the animal conditionally or inducibly expresses Cas13 akin to Platt et al. The target cell or animal thus comprises the CRISPR enzyme (e.g., Cas13) conditionally or inducibly (e.g., in the form of Cre dependent constructs), on expression of a vector introduced into the target cell, the vector expresses that which induces or gives rise to the condition of the CRISPR enzyme (e.g., Cas13) expression in the target cell. By applying the teaching and compositions as defined herein with the known method of creating a CRISPR complex, inducible genomic events are also an aspect of the current invention. Examples of such inducible events have been described herein elsewhere.

[0230] In some embodiments, phenotypic alteration is preferably the result of genome modification when a genetic disease is targeted, especially in methods of therapy and preferably where a repair template is provided to correct or alter the phenotype.

[0231] In some embodiments diseases that may be targeted include those concerned with disease-causing splice defects.

[0232] In some embodiments, cellular targets include Hemopoietic Stem/Progenitor Cells (CD34+); Human T cells; and Eye (retinal cells)—for example photoreceptor precursor cells.

[0233] In some embodiments Gene targets include: Human Beta Globin-HBB (for treating Sickle Cell Anemia, including by stimulating gene-conversion (using closely related HBD gene as an endogenous template)); CD3 (T-Cells); and CEP920−retina (eye).

[0234] In some embodiments disease targets also include: cancer; Sickle Cell Anemia (based on a point mutation); HBV, HIV; Beta-Thalassemia; and ophthalmic or ocular disease—for example Leber Congenital Amaurosis (LCA)-causing Splice Defect.

[0235] In some embodiments delivery methods include: Cationic Lipid Mediated “direct” delivery of Enzyme-Guide complex (RiboNucleoProtein) and electroporation of plasmid DNA.

[0236] Methods, products and uses described herein may be used for non-therapeutic purposes. Furthermore, any of the methods described herein may be applied in vitro and ex vivo.

[0237] In an aspect, provided is a non-naturally occurring or engineered composition comprising:
[0238] I. two or more CRISPR-Cas system polynucleotide sequences comprising
[0239] (a) a first guide sequence capable of hybridizing to a first target sequence in a polynucleotide locus,
[0240] (b) a second guide sequence capable of hybridizing to a second target sequence in a polynucleotide locus,
[0241] (c) a direct repeat sequence,
[0242] and
[0243] II. a Cas13 enzyme or a second polynucleotide sequence encoding it,
[0244] wherein when transcribed, the first and the second guide sequences direct sequence-specific binding of a first and a second Cas13 CRISPR complex to the first and second target sequences respectively,
[0245] wherein the first CRISPR complex comprises the Cas13 enzyme complexed with the first guide sequence that is hybridizable to the first target sequence,
[0246] wherein the second CRISPR complex comprises the Cas13 enzyme complexed with the second guide sequence that is hybridizable to the second target sequence, and
[0247] wherein the first guide sequence directs cleavage of one strand of the DNA duplex near the first target sequence and the second guide sequence directs cleavage of the other strand near the second target sequence inducing a double strand break, thereby modifying the organism or the non-human or non-animal organism. Similarly, compositions comprising more than two guide RNAs can be envisaged e.g. each specific for one target, and arranged tandemly in the composition or CRISPR system or complex as described herein.

[0248] In another embodiment, the Cas13 is delivered into the cell as a protein. In another and particularly preferred embodiment, the Cas13 is delivered into the cell as a protein or as a nucleotide sequence encoding it. Delivery to the cell as a protein may include delivery of a Ribonucleoprotein (RNP) complex, where the protein is complexed with the multiple guides.

[0249] In an aspect, host cells and cell lines modified by or comprising the compositions, systems or modified enzymes of present invention are provided, including stem cells, and progeny thereof.

[0250] In an aspect, methods of cellular therapy are provided, where, for example, a single cell or a population of cells is sampled or cultured, wherein that cell or cells is or has been modified ex vivo as described herein, and is then re-introduced (sampled cells) or introduced (cultured cells) into the organism. Stem cells, whether embryonic or induce pluripotent or totipotent stem cells, are also particularly preferred in this regard. But, of course, in vivo embodiments are also envisaged.

[0251] Inventive methods can further comprise delivery of templates, such as repair templates, which may be dsODN or ssODN, see below. Delivery of templates may be via the cotemporaneous or separate from delivery of any or all the CRISPR enzyme or guide RNAs and via the same delivery mechanism or different. In some embodiments, it is preferred that the template is delivered together with the guide RNAs and, preferably, also the CRISPR enzyme. An example may be an AAV vector where the CRISPR enzyme is AsCas13 or LbCas13.

[0252] Inventive methods can further comprise: (a) delivering to the cell a double-stranded oligodeoxynucleotide (dsODN) comprising overhangs complimentary to the overhangs created by said double strand break, wherein said dsODN is integrated into the locus of interest; or—(b) delivering to the cell a single-stranded oligodeoxynucleotide (ssODN), wherein said ssODN acts as a template for homology directed repair of said double strand break. Inventive methods can be for the prevention or treatment of disease in an individual, optionally wherein said disease is caused by a defect in said locus of interest. Inventive methods can be conducted in vivo in the individual or ex vivo on a cell taken from the individual, optionally wherein said cell is returned to the individual.

[0253] The invention also comprehends products obtained from using CRISPR enzyme or Cas enzyme or Cas13 enzyme or CRISPR-CRISPR enzyme or CRISPR-Cas system or CRISPR-Cas13 system for use in tandem or multiple targeting as defined herein.

### Escorted Guides for the Cas13 CRISPR-Cas System According to the Invention

[0254] In one aspect the invention provides escorted Cas13 CRISPR-Cas systems or complexes, especially such a system involving an escorted Cas13 CRISPR-Cas system guide. By “escorted” is meant that the Cas13 CRISPR-Cas system or complex or guide is delivered to a selected time or place within a cell, so that activity of the Cas13 CRISPR-Cas system or complex or guide is spatially or temporally controlled. For example, the activity and destination of the Cas13 CRISPR-Cas system or complex or guide may be controlled by an escort RNA aptamer sequence that has binding affinity for an aptamer ligand, such as a cell surface protein or other localized cellular component. Alternatively, the escort aptamer may for example be responsive to an aptamer effector on or in the cell, such as a transient effector, such as an external energy source that is applied to the cell at a particular time.

[0255] The escorted Cas13 CRISPR-Cas systems or complexes have a gRNA with a functional structure designed to improve gRNA structure, architecture, stability, genetic expression, or any combination thereof. Such a structure can include an aptamer.

[0256] Aptamers are biomolecules that can be designed or selected to bind tightly to other ligands, for example using a technique called systematic evolution of ligands by exponential enrichment (SELEX; Tuerk C, Gold L: “Systematic evolution of ligands by exponential enrichment: RNA ligands to bacteriophage T4 DNA polymerase.” Science 1990, 249:505-510). Nucleic acid aptamers can for example be selected from pools of random-sequence oligonucleotides, with high binding affinities and specificities for a wide range of biomedically relevant targets, suggesting a wide range of therapeutic utilities for aptamers (Keefe, Anthony D., Supriya Pai, and Andrew Ellington. “Aptamers as therapeutics.” Nature Reviews Drug Discovery 9.7 (2010): 537-550). These characteristics also suggest a wide range of uses for aptamers as drug delivery vehicles (Levy-Nissenbaum, Etgar, et al. “Nanotechnology and aptamers: applications in drug delivery.” Trends in biotechnology 26.8 (2008): 442-449; and, Hicke B J, Stephens A W. “Escort aptamers: a delivery service for diagnosis and therapy.” J Clin Invest 2000, 106:923-928). Aptamers may also be constructed that function as molecular switches, responding to a que by changing properties, such as RNA aptamers that bind fluorophores to mimic the activity of green fluorescent protein (Paige, Jeremy S., Karen Y. Wu, and Samie R. Jaffrey. “RNA mimics of green fluorescent protein.” Science 333.6042 (2011): 642-646). It has also been suggested that aptamers may be used as components of targeted siRNA therapeutic delivery systems, for example targeting cell surface proteins (Zhou, Jiehua, and John J. Rossi. “Aptamer-targeted cell-specific RNA interference.” Silence 1.1 (2010): 4).

[0257] Accordingly, provided herein is a gRNA modified, e.g., by one or more aptamer(s) designed to improve gRNA delivery, including delivery across the cellular membrane, to intracellular compartments, or into the nucleus. Such a structure can include, either in addition to the one or more aptamer(s) or without such one or more aptamer(s), moiety(ies) so as to render the guide deliverable, inducible or responsive to a selected effector. The invention accordingly comprehends an gRNA that responds to normal or pathological physiological conditions, including without limitation pH, hypoxia, O₂ concentration, temperature, protein concentration, enzymatic concentration, lipid structure, light exposure, mechanical disruption (e.g. ultrasound waves), magnetic fields, electric fields, or electromagnetic radiation.

[0258] An aspect of the invention provides non-naturally occurring or engineered composition comprising an escorted guide RNA (egRNA) comprising:
[0259] an RNA guide sequence capable of hybridizing to a target sequence in a genomic locus of interest in a cell; and,
[0260] an escort RNA aptamer sequence, wherein the escort aptamer has binding affinity for an aptamer ligand on or in the cell, or the escort aptamer is responsive to a localized aptamer effector on or in the cell, wherein the presence of the aptamer ligand or effector on or in the cell is spatially or temporally restricted.

[0261] The escort aptamer may for example change conformation in response to an interaction with the aptamer ligand or effector in the cell.

[0262] The escort aptamer may have specific binding affinity for the aptamer ligand.

[0263] The aptamer ligand may be localized in a location or compartment of the cell, for example on or in a membrane of the cell. Binding of the escort aptamer to the aptamer ligand may accordingly direct the egRNA to a location of interest in the cell, such as the interior of the cell by way of binding to an aptamer ligand that is a cell surface ligand. In this way, a variety of spatially restricted locations within the cell may be targeted, such as the cell nucleus or mitochondria.

[0264] Once intended alterations have been introduced, such as by editing intended copies of a gene in the genome of a cell, continued CRISPR/Cas13 expression in that cell is no longer necessary. Indeed, sustained expression would be undesirable in certain casein case of off-target effects at unintended genomic sites, etc. Thus time-limited expression would be useful. Inducible expression offers one approach, but in addition Applicants have engineered a Self-Inactivating Cas13 CRISPR-Cas system that relies on the use of a non-coding guide target sequence within the CRISPR vector itself. Thus, after expression begins, the CRISPR system will lead to its own destruction, but before destruction is complete it will have time to edit the genomic copies of the target gene (which, with a normal point mutation in a diploid cell, requires at most two edits). Simply, the self inactivating Cas13 CRISPR-Cas system includes additional RNA (i.e., guide RNA) that targets the coding sequence for the CRISPR enzyme itself or that targets one or more non-coding guide target sequences complementary to unique sequences present in one or more of the following: (a) within the promoter driving expression of the non-coding RNA elements, (b) within the promoter driving expression of the Cas13 gene, (c) within 100 bp of the ATG translational start codon in the Cas13 coding sequence, (d) within the inverted terminal repeat (iTR) of a viral delivery vector, e.g., in an AAV genome.

[0265] The egRNA may include an RNA aptamer linking sequence, operably linking the escort RNA sequence to the RNA guide sequence.

[0266] In embodiments, the egRNA may include one or more photolabile bonds or non-naturally occurring residues.

[0267] In one aspect, the escort RNA aptamer sequence may be complementary to a target miRNA, which may or may not be present within a cell, so that only when the target miRNA is present is there binding of the escort RNA aptamer sequence to the target miRNA which results in cleavage of the egRNA by an RNA-induced silencing complex (RISC) within the cell.

[0268] In embodiments, the escort RNA aptamer sequence may for example be from 10 to 200 nucleotides in length, and the egRNA may include more than one escort RNA aptamer sequence.

[0269] It is to be understood that any of the RNA guide sequences as described herein elsewhere can be used in the egRNA described herein. In certain embodiments of the invention, the guide RNA or mature crRNA comprises, consists essentially of, or consists of a direct repeat sequence and a guide sequence or spacer sequence. In certain embodiments, the guide RNA or mature crRNA comprises, consists essentially of, or consists of a direct repeat sequence linked to a guide sequence or spacer sequence. In certain embodiments the guide RNA or mature crRNA comprises 19 nts of partial direct repeat followed by 23-25 nt of guide sequence or spacer sequence. In certain embodiments, the effector protein is a FnCas13 effector protein and requires at least 16 nt of guide sequence to achieve detectable DNA cleavage and a minimum of 17 nt of guide sequence to achieve efficient DNA cleavage in vitro. In certain embodiments, the direct repeat sequence is located upstream (i.e., 5′) from the guide sequence or spacer sequence. In a preferred embodiment the seed sequence (i.e. the sequence essential critical for recognition and/or hybridization to the sequence at the target locus) of the Cas13Cas13 guide RNA is approximately within the first 5 nt on the 5′ end of the guide sequence or spacer sequence.

[0270] The egRNA may be included in a non-naturally occurring or engineered Cas13Cas13 CRISPR-Cas complex composition, together with a Cas13 which may include at least one mutation, for example a mutation so that the Cas13 has no more than 5% of the nuclease activity of a Cas13 not having the at least one mutation, for example having a diminished nuclease activity of at least 97%, or 100% as compared with the Cas13 not having the at least one mutation. The Cas13 may also include one or more nuclear localization sequences. Mutated Cas13 enzymes having modulated activity such as diminished nuclease activity are described herein elsewhere.

[0271] The engineered Cas13 CRISPR-Cas composition may be provided in a cell, such as a eukaryotic cell, a mammalian cell, or a human cell.

[0272] In embodiments, the compositions described herein comprise a Cas13 CRISPR-Cas complex having at least three functional domains, at least one of which is associated with Cas13 and at least two of which are associated with egRNA.

[0273] The compositions described herein may be used to introduce a genomic locus event in a host cell, such as an eukaryotic cell, in particular a mammalian cell, or a non-human eukaryote, in particular a non-human mammal such as a mouse, in vivo. The genomic locus event may comprise affecting gene activation, gene inhibition, or cleavage in a locus. The compositions described herein may also be used to modify a genomic locus of interest to change gene expression in a cell. Methods of introducing a genomic locus event in a host cell using the Cas13 enzyme provided herein are described herein in detail elsewhere. Delivery of the composition may for example be by way of delivery of a nucleic acid molecule(s) coding for the composition, which nucleic acid molecule(s) is operatively linked to regulatory sequence(s), and expression of the nucleic acid molecule(s) in vivo, for example by way of a lentivirus, an adenovirus, or an AAV.

[0274] The present invention provides compositions and methods by which gRNA-mediated gene editing activity can be adapted. The invention provides gRNA secondary structures that improve cutting efficiency by increasing gRNA and/or increasing the amount of RNA delivered into the cell. The gRNA may include light labile or inducible nucleotides.

[0275] To increase the effectiveness of gRNA, for example gRNA delivered with viral or non-viral technologies, Applicants added secondary structures into the gRNA that enhance its stability and improve gene editing. Separately, to overcome the lack of effective delivery, Applicants modified gRNAs with cell penetrating RNA aptamers; the aptamers bind to cell surface receptors and promote the entry of gRNAs into cells. Notably, the cell-penetrating aptamers can be designed to target specific cell receptors, in order to mediate cell-specific delivery. Applicants also have created guides that are inducible.

[0276] Light responsiveness of an inducible system may be achieved via the activation and binding of cryptochrome-2 and CIB1. Blue light stimulation induces an activating conformational change in cryptochrome-2, resulting in recruitment of its binding partner CIB1. This binding is fast and reversible, achieving saturation in <15 sec following pulsed stimulation and returning to baseline <15 min after the end of stimulation. These rapid binding kinetics result in a system temporally bound only by the speed of transcription/translation and transcript/protein degradation, rather than uptake and clearance of inducing agents. Crytochrome-2 activation is also highly sensitive, allowing for the use of low light intensity stimulation and mitigating the risks of phototoxicity. Further, in a context such as the intact mammalian brain, variable light intensity may be used to control the size of a stimulated region, allowing for greater precision than vector delivery alone may offer.

[0277] The invention contemplates energy sources such as electromagnetic radiation, sound energy or thermal energy to induce the guide. Advantageously, the electromagnetic radiation is a component of visible light. In a preferred embodiment, the light is a blue light with a wavelength of about 450 to about 495 nm. In an especially preferred embodiment, the wavelength is about 488 nm. In another preferred embodiment, the light stimulation is via pulses. The light power may range from about 0-9 mW/cm². In a preferred embodiment, a stimulation paradigm of as low as 0.25 sec every 15 sec should result in maximal activation.

[0278] Cells involved in the practice of the present invention may be a prokaryotic cell or a eukaryotic cell, advantageously an animal cell a plant cell or a yeast cell, more advantageously a mammalian cell.

[0279] The chemical or energy sensitive guide may undergo a conformational change upon induction by the binding of a chemical source or by the energy allowing it act as a guide and have the Cas13 CRISPR-Cas system or complex function. The invention can involve applying the chemical source or energy so as to have the guide function and the Cas13 CRISPR-Cas system or complex function; and optionally further determining that the expression of the genomic locus is altered.

[0280] There are several different designs of this chemical inducible system: 1. ABI-PYL based system inducible by Abscisic Acid (ABA) (see, e.g., stke.sciencemag.org/cgi/content/abstract/sigtrans; 4/164/rs2), 2. FKBP-FRB based system inducible by rapamycin (or related chemicals based on rapamycin) (see, e.g., www.nature.com/nmeth/journal/v2/n6/full/nmeth763.html), 3. GID1-GAI based system inducible by Gibberellin (GA) (see, e.g., www.nature.com/nchembio/journal/v8/n5/full/nchembio.922.html).

[0281] Another system contemplated by the present invention is a chemical inducible system based on change in sub-cellular localization. Applicants also developed a system in which the polypeptide include a DNA binding domain comprising at least five or more Transcription activator-like effector (TALE) monomers and at least one or more half-monomers specifically ordered to target the genomic locus of interest linked to at least one or more effector domains are further linker to a chemical or energy sensitive protein. This protein will lead to a change in the sub-cellular localization of the entire polypeptide (i.e. transportation of the entire polypeptide from cytoplasm into the nucleus of the cells) upon the binding of a chemical or energy transfer to the chemical or energy sensitive protein. This transportation of the entire polypeptide from one sub-cellular compartments or organelles, in which its activity is sequestered due to lack of substrate for the effector domain, into another one in which the substrate is present would allow the entire polypeptide to come in contact with its desired substrate (i.e. genomic DNA in the mammalian nucleus) and result in activation or repression of target gene expression.

[0282] This type of system could also be used to induce the cleavage of a genomic locus of interest in a cell when the effector domain is a nuclease.

[0283] A chemical inducible system can be an estrogen receptor (ER) based system inducible by 4-hydroxytamoxifen (4OHT) (see, e.g., www.pnas.org/content/104/3/1027.abstract). A mutated ligand-binding domain of the estrogen receptor called ERT2 translocates into the nucleus of cells upon binding of 4-hydroxytamoxifen. In further embodiments of the invention any naturally occurring or engineered derivative of any nuclear receptor, thyroid hormone receptor, retinoic acid receptor, estrogen receptor, estrogen-related receptor, glucocorticoid receptor, progesterone receptor, androgen receptor may be used in inducible systems analogous to the ER based inducible system.

[0284] Another inducible system is based on the design using Transient receptor potential (TRP) ion channel based system inducible by energy, heat or radio-wave (see, e.g., www.sciencemag.org/content/336/6081/604). These TRP family proteins respond to different stimuli, including light and heat. When this protein is activated by light or heat, the ion channel will open and allow the entering of ions such as calcium into the plasma membrane. This influx of ions will bind to intracellular ion interacting partners linked to a polypeptide including the guide and the other components of the Cas13 CRISPR-Cas complex or system, and the binding will induce the change of sub-cellular localization of the polypeptide, leading to the entire polypeptide entering the nucleus of cells. Once inside the nucleus, the guide protein and the other components of the Cas13 CRISPR-Cas complex will be active and modulating target gene expression in cells.

[0285] This type of system could also be used to induce the cleavage of a genomic locus of interest in a cell; and, in this regard, it is noted that the Cas13 enzyme is a nuclease. The light could be generated with a laser or other forms of energy sources. The heat could be generated by raise of temperature results from an energy source, or from nano-particles that release heat after absorbing energy from an energy source delivered in the form of radio-wave.

[0286] While light activation may be an advantageous embodiment, sometimes it may be disadvantageous especially for in vivo applications in which the light may not penetrate the skin or other organs. In this instance, other methods of energy activation are contemplated, in particular, electric field energy and/or ultrasound which have a similar effect.

[0287] Electric field energy is preferably administered substantially as described in the art, using one or more electric pulses of from about 1 Volt/cm to about 10 kVolts/cm under in vivo conditions. Instead of or in addition to the pulses, the electric field may be delivered in a continuous manner. The electric pulse may be applied for between 1 us and 500 milliseconds, preferably between 1 us and 100 milliseconds. The electric field may be applied continuously or in a pulsed manner for 5 about minutes.

[0288] As used herein, ‘electric field energy’ is the electrical energy to which a cell is exposed. Preferably the electric field has a strength of from about 1 Volt/cm to about 10 kVolts/cm or more under in vivo conditions (see WO97/49450).

[0289] As used herein, the term “electric field” includes one or more pulses at variable capacitance and voltage and including exponential and/or square wave and/or modulated wave and/or modulated square wave forms. References to electric fields and electricity should be taken to include reference the presence of an electric potential difference in the environment of a cell. Such an environment may be set up by way of static electricity, alternating current (AC), direct current (DC), etc, as known in the art. The electric field may be uniform, non-uniform or otherwise, and may vary in strength and/or direction in a time dependent manner.

[0290] Single or multiple applications of electric field, as well as single or multiple applications of ultrasound are also possible, in any order and in any combination. The ultrasound and/or the electric field may be delivered as single or multiple continuous applications, or as pulses (pulsatile delivery).

[0291] Electroporation has been used in both in vitro and in vivo procedures to introduce foreign material into living cells. With in vitro applications, a sample of live cells is first mixed with the agent of interest and placed between electrodes such as parallel plates. Then, the electrodes apply an electrical field to the cell/implant mixture. Examples of systems that perform in vitro electroporation include the Electro Cell Manipulator ECM600 product, and the Electro Square Porator T820, both made by the BTX Division of Genetronics, Inc (see U.S. Pat. No. 5,869,326).

[0292] The known electroporation techniques (both in vitro and in vivo) function by applying a brief high voltage pulse to electrodes positioned around the treatment region. The electric field generated between the electrodes causes the cell membranes to temporarily become porous, whereupon molecules of the agent of interest enter the cells. In known electroporation applications, this electric field comprises a single square wave pulse on the order of 1000 V/cm, of about 100 .mu.s duration. Such a pulse may be generated, for example, in known applications of the Electro Square Porator T820.

[0293] Preferably, the electric field has a strength of from about 1 V/cm to about 10 kV/cm under in vitro conditions. Thus, the electric field may have a strength of 1 V/cm, 2 V/cm, 3 V/cm, 4 V/cm, 5 V/cm, 6 V/cm, 7 V/cm, 8 V/cm, 9 V/cm, 10 V/cm, 20 V/cm, 50 V/cm, 100 V/cm, 200 V/cm, 300 V/cm, 400 V/cm, 500 V/cm, 600 V/cm, 700 V/cm, 800 V/cm, 900 V/cm, 1 kV/cm, 2 kV/cm, 5 kV/cm, 10 kV/cm, 20 kV/cm, 50 kV/cm or more. More preferably from about 0.5 kV/cm to about 4.0 kV/cm under in vitro conditions. Preferably the electric field has a strength of from about 1 V/cm to about 10 kV/cm under in vivo conditions. However, the electric field strengths may be lowered where the number of pulses delivered to the target site are increased. Thus, pulsatile delivery of electric fields at lower field strengths is envisaged.

[0294] Preferably the application of the electric field is in the form of multiple pulses such as double pulses of the same strength and capacitance or sequential pulses of varying strength and/or capacitance. As used herein, the term “pulse” includes one or more electric pulses at variable capacitance and voltage and including exponential and/or square wave and/or modulated wave/square wave forms.

[0295] Preferably the electric pulse is delivered as a waveform selected from an exponential wave form, a square wave form, a modulated wave form and a modulated square wave form.

[0296] A preferred embodiment employs direct current at low voltage. Thus, Applicants disclose the use of an electric field which is applied to the cell, tissue or tissue mass at a field strength of between 1V/cm and 20V/cm, for a period of 100 milliseconds or more, preferably 15 minutes or more.

[0297] Ultrasound is advantageously administered at a power level of from about 0.05 W/cm² to about 100 W/cm². Diagnostic or therapeutic ultrasound may be used, or combinations thereof.

[0298] As used herein, the term “ultrasound” refers to a form of energy which consists of mechanical vibrations the frequencies of which are so high they are above the range of human hearing. Lower frequency limit of the ultrasonic spectrum may generally be taken as about 20 kHz. Most diagnostic applications of ultrasound employ frequencies in the range 1 and 15 MHz′ (From Ultrasonics in Clinical Diagnosis, P. N. T. Wells, ed., 2nd. Edition, Publ. Churchill Livingstone [Edinburgh, London & NY, 1977]).

[0299] Ultrasound has been used in both diagnostic and therapeutic applications. When used as a diagnostic tool (“diagnostic ultrasound”), ultrasound is typically used in an energy density range of up to about 100 mW/cm² (FDA recommendation), although energy densities of up to 750 mW/cm² have been used. In physiotherapy, ultrasound is typically used as an energy source in a range up to about 3 to 4 W/cm² (WHO recommendation). In other therapeutic applications, higher intensities of ultrasound may be employed, for example, HIFU at 100 W/cm up to 1 kW/cm² (or even higher) for short periods of time. The term “ultrasound” as used in this specification is intended to encompass diagnostic, therapeutic and focused ultrasound.

[0300] Focused ultrasound (FUS) allows thermal energy to be delivered without an invasive probe (see Morocz et al 1998 Journal of Magnetic Resonance Imaging Vol. 8, No. 1, pp. 136-142. Another form of focused ultrasound is high intensity focused ultrasound (HIFU) which is reviewed by Moussatov et al in Ultrasonics (1998) Vol. 36, No. 8, pp. 893-900 and TranHuuHue et al in Acustica (1997) Vol. 83, No. 6, pp. 1103-1106.

[0301] Preferably, a combination of diagnostic ultrasound and a therapeutic ultrasound is employed. This combination is not intended to be limiting, however, and the skilled reader will appreciate that any variety of combinations of ultrasound may be used. Additionally, the energy density, frequency of ultrasound, and period of exposure may be varied.

[0302] Preferably the exposure to an ultrasound energy source is at a power density of from about 0.05 to about 100 Wcm⁻². Even more preferably, the exposure to an ultrasound energy source is at a power density of from about 1 to about 15 Wcm⁻².

[0303] Preferably the exposure to an ultrasound energy source is at a frequency of from about 0.015 to about 10.0 MHz. More preferably the exposure to an ultrasound energy source is at a frequency of from about 0.02 to about 5.0 MHz or about 6.0 MHz. Most preferably, the ultrasound is applied at a frequency of 3 MHz.

[0304] Preferably the exposure is for periods of from about 10 milliseconds to about 60 minutes. Preferably the exposure is for periods of from about 1 second to about 5 minutes. More preferably, the ultrasound is applied for about 2 minutes. Depending on the particular target cell to be disrupted, however, the exposure may be for a longer duration, for example, for 15 minutes.

[0305] Advantageously, the target tissue is exposed to an ultrasound energy source at an acoustic power density of from about 0.05 Wcm⁻² to about 10 Wcm⁻² with a frequency ranging from about 0.015 to about 10 MHz (see WO 98/52609). However, alternatives are also possible, for example, exposure to an ultrasound energy source at an acoustic power density of above 100 Wcm⁻², but for reduced periods of time, for example, 1000 Wcm⁻² for periods in the millisecond range or less.

[0306] Preferably the application of the ultrasound is in the form of multiple pulses; thus, both continuous wave and pulsed wave (pulsatile delivery of ultrasound) may be employed in any combination. For example, continuous wave ultrasound may be applied, followed by pulsed wave ultrasound, or vice versa. This may be repeated any number of times, in any order and combination. The pulsed wave ultrasound may be applied against a background of continuous wave ultrasound, and any number of pulses may be used in any number of groups.

[0307] Preferably, the ultrasound may comprise pulsed wave ultrasound. In a highly preferred embodiment, the ultrasound is applied at a power density of 0.7 Wcm⁻² or 1.25 Wcm⁻² as a continuous wave. Higher power densities may be employed if pulsed wave ultrasound is used.

[0308] Use of ultrasound is advantageous as, like light, it may be focused accurately on a target. Moreover, ultrasound is advantageous as it may be focused more deeply into tissues unlike light. It is therefore better suited to whole-tissue penetration (such as but not limited to a lobe of the liver) or whole organ (such as but not limited to the entire liver or an entire muscle, such as the heart) therapy. Another important advantage is that ultrasound is a non-invasive stimulus which is used in a wide variety of diagnostic and therapeutic applications. By way of example, ultrasound is well known in medical imaging techniques and, additionally, in orthopedic therapy. Furthermore, instruments suitable for the application of ultrasound to a subject vertebrate are widely available and their use is well known in the art.

[0309] The rapid transcriptional response and endogenous targeting of the instant invention make for an ideal system for the study of transcriptional dynamics. For example, the instant invention may be used to study the dynamics of variant production upon induced expression of a target gene. On the other end of the transcription cycle, mRNA degradation studies are often performed in response to a strong extracellular stimulus, causing expression level changes in a plethora of genes. The instant invention may be utilized to reversibly induce transcription of an endogenous target, after which point stimulation may be stopped and the degradation kinetics of the unique target may be tracked.

[0310] The temporal precision of the instant invention may provide the power to time genetic regulation in concert with experimental interventions. For example, targets with suspected involvement in long-term potentiation (LTP) may be modulated in organotypic or dissociated neuronal cultures, but only during stimulus to induce LTP, so as to avoid interfering with the normal development of the cells. Similarly, in cellular models exhibiting disease phenotypes, targets suspected to be involved in the effectiveness of a particular therapy may be modulated only during treatment. Conversely, genetic targets may be modulated only during a pathological stimulus. Any number of experiments in which timing of genetic cues to external experimental stimuli is of relevance may potentially benefit from the utility of the instant invention.

[0311] The in vivo context offers equally rich opportunities for the instant invention to control gene expression. Photoinducibility provides the potential for spatial precision. Taking advantage of the development of optrode technology, a stimulating fiber optic lead may be placed in a precise brain region. Stimulation region size may then be tuned by light intensity. This may be done in conjunction with the delivery of the Cas13 CRISPR-Cas system or complex of the invention, or, in the case of transgenic Cas13 animals, guide RNA of the invention may be delivered and the optrode technology can allow for the modulation of gene expression in precise brain regions. A transparent Cas13 expressing organism, can have guide RNA of the invention administered to it and then there can be extremely precise laser induced local gene expression changes.

[0312] A culture medium for culturing host cells includes a medium commonly used for tissue culture, such as M199-earle base, Eagle MEM (E-MEM), Dulbecco MEM (DMEM), SC-UCM102, UP-SFM (GIBCO BRL), EX-CELL302 (Nichirei), EX-CELL293-S(Nichirei), TFBM-01 (Nichirei), ASF104, among others. Suitable culture media for specific cell types may be found at the American Type Culture Collection (ATCC) or the European Collection of Cell Cultures (ECACC). Culture media may be supplemented with amino acids such as L-glutamine, salts, anti-fungal or anti-bacterial agents such as Fungizone®, penicillin-streptomycin, animal serum, and the like. The cell culture medium may optionally be serum-free.

[0313] The invention may also offer valuable temporal precision in vivo. The invention may be used to alter gene expression during a particular stage of development. The invention may be used to time a genetic cue to a particular experimental window. For example, genes implicated in learning may be overexpressed or repressed only during the learning stimulus in a precise region of the intact rodent or primate brain. Further, the invention may be used to induce gene expression changes only during particular stages of disease development. For example, an oncogene may be overexpressed only once a tumor reaches a particular size or metastatic stage. Conversely, proteins suspected in the development of Alzheimer's may be knocked down only at defined time points in the animal's life and within a particular brain region. Although these examples do not exhaustively list the potential applications of the invention, they highlight some of the areas in which the invention may be a powerful technology.

Protected Guides: Enzymes According to the Invention can be Used in Combination with Protected Guide RNAs

[0314] In one aspect, an object of the current invention is to further enhance the specificity of Cas13 given individual guide RNAs through thermodynamic tuning of the binding specificity of the guide RNA to target DNA. This is a general approach of introducing mismatches, elongation or truncation of the guide sequence to increase/decrease the number of complimentary bases vs. mismatched bases shared between a genomic target and its potential off-target loci, in order to give thermodynamic advantage to targeted genomic loci over genomic off-targets.

[0315] In one aspect, the invention provides for the guide sequence being modified by secondary structure to increase the specificity of the Cas13 CRISPR-Cas system and whereby the secondary structure can protect against exonuclease activity and allow for 3′ additions to the guide sequence.

[0316] In one aspect, the invention provides for hybridizing a “protector RNA” to a guide sequence, wherein the “protector RNA” is an RNA strand complementary to the 5′ end of the guide RNA (gRNA), to thereby generate a partially double-stranded gRNA. In an embodiment of the invention, protecting the mismatched bases with a perfectly complementary protector sequence decreases the likelihood of target DNA binding to the mismatched base pairs at the 3′ end. In embodiments of the invention, additional sequences comprising an extended length may also be present.

[0317] Guide RNA (gRNA) extensions matching the genomic target provide gRNA protection and enhance specificity. Extension of the gRNA with matching sequence distal to the end of the spacer seed for individual genomic targets is envisaged to provide enhanced specificity. Matching gRNA extensions that enhance specificity have been observed in cells without truncation. Prediction of gRNA structure accompanying these stable length extensions has shown that stable forms arise from protective states, where the extension forms a closed loop with the gRNA seed due to complimentary sequences in the spacer extension and the spacer seed. These results demonstrate that the protected guide concept also includes sequences matching the genomic target sequence distal of the 20mer spacer-binding region. Thermodynamic prediction can be used to predict completely matching or partially matching guide extensions that result in protected gRNA states. This extends the concept of protected gRNAs to interaction between X and Z, where X will generally be of length 17-20 nt and Z is of length 1-30 nt. Thermodynamic prediction can be used to determine the optimal extension state for Z, potentially introducing small numbers of mismatches in Z to promote the formation of protected conformations between X and Z. Throughout the present application, the terms “X” and seed length (SL) are used interchangeably with the term exposed length (EpL) which denotes the number of nucleotides available for target DNA to bind; the terms “Y” and protector length (PL) are used interchangeably to represent the length of the protector; and the terms “Z”, “E”, “E′” and “EL” are used interchangeably to correspond to the term extended length (ExL) which represents the number of nucleotides by which the target sequence is extended.

[0318] An extension sequence which corresponds to the extended length (ExL) may optionally be attached directly to the guide sequence at the 3′ end of the protected guide sequence. The extension sequence may be 2 to 12 nucleotides in length. Preferably ExL may be denoted as 0, 2, 4, 6, 8, 10 or 12 nucleotides in length. In a preferred embodiment the ExL is denoted as 0 or 4 nucleotides in length. In a more preferred embodiment the ExL is 4 nucleotides in length. The extension sequence may or may not be complementary to the target sequence.

[0319] An extension sequence may further optionally be attached directly to the guide sequence at the 5′ end of the protected guide sequence as well as to the 3′ end of a protecting sequence. As a result, the extension sequence serves as a linking sequence between the protected sequence and the protecting sequence. Without wishing to be bound by theory, such a link may position the protecting sequence near the protected sequence for improved binding of the protecting sequence to the protected sequence. It will be understood that the above-described relationship of seed, protector, and extension applies where the distal end (i.e., the targeting end) of the guide is the 5′ end, e.g. a guide that functions is a Cas13 system. In an embodiment wherein the distal end of the guide is the 3′ end, the relationship will be the reverse. In such an embodiment, the invention provides for hybridizing a “protector RNA” to a guide sequence, wherein the “protector RNA” is an RNA strand complementary to the 3′ end of the guide RNA (gRNA), to thereby generate a partially double-stranded gRNA.

[0320] Addition of gRNA mismatches to the distal end of the gRNA can demonstrate enhanced specificity. The introduction of unprotected distal mismatches in Y or extension of the gRNA with distal mismatches (Z) can demonstrate enhanced specificity. This concept as mentioned is tied to X, Y, and Z components used in protected gRNAs. The unprotected mismatch concept may be further generalized to the concepts of X, Y, and Z described for protected guide RNAs.

[0321] Cas13. In one aspect, the invention provides for enhanced Cas13 specificity wherein the double stranded 3′ end of the protected guide RNA (pgRNA) allows for two possible outcomes: (1) the guide RNA-protector RNA to guide RNA-target DNA strand exchange will occur and the guide will fully bind the target, or (2) the guide RNA will fail to fully bind the target and because Cas13 target cleavage is a multiple step kinetic reaction that requires guide RNA:target RNA binding to activate Cas13Cas13-catalyzed DSBs, wherein Cas13 cleavage does not occur if the guide RNA does not properly bind. According to particular embodiments, the protected guide RNA improves specificity of target binding as compared to a naturally occurring CRISPR-Cas system. According to particular embodiments the protected modified guide RNA improves stability as compared to a naturally occurring CRISPR-Cas. According to particular embodiments the protector sequence has a length between 3 and 120 nucleotides and comprises 3 or more contiguous nucleotides complementary to another sequence of guide or protector. According to particular embodiments, the protector sequence forms a hairpin. According to particular embodiments the guide RNA further comprises a protected sequence and an exposed sequence. According to particular embodiments the exposed sequence is 1 to 19 nucleotides. More particularly, the exposed sequence is at least 75%, at least 90% or about 100% complementary to the target sequence. According to particular embodiments the guide sequence is at least 90% or about 100% complementary to the protector strand. According to particular embodiments the guide sequence is at least 75%, at least 90% or about 100% complementary to the target sequence. According to particular embodiments, the guide RNA further comprises an extension sequence. More particularly, when the distal end of the guide is the 3′ end, the extension sequence is operably linked to the 3′ end of the protected guide sequence, and optionally directly linked to the 3′ end of the protected guide sequence. According to particular embodiments the extension sequence is 1-12 nucleotides. According to particular embodiments the extension sequence is operably linked to the guide sequence at the 3′ end of the protected guide sequence and the 5′ end of the protector strand and optionally directly linked to the 3′ end of the protected guide sequence and the 5′ end of the protector strand, wherein the extension sequence is a linking sequence between the protected sequence and the protector strand. According to particular embodiments the extension sequence is 100% not complementary to the protector strand, optionally at least 95%, at least 90%, at least 80%, at least 70%, at least 60%, or at least 50% not complementary to the protector strand. According to particular embodiments the guide sequence further comprises mismatches appended to the end of the guide sequence, wherein the mismatches thermodynamically optimize specificity.

[0322] According to the invention, in certain embodiments, guide modifications that impede strand invasion will be desireable. For example, to minimize off-target actifity, in certain embodiments, it will be desireable to design or modify a guide to impede strand invasiom at off-target sites. In certain such embodiments, it may be acceptable or useful to design or modify a guide at the expense of on-target binding efficiency. In certain embodiments, guide-target mismatches at the target site may be tolerated that substantially reduce off-target activity.

[0323] In certain embodiments of the invention, it is desirable to adjust the binding characteristics of the protected guide to minimize off-target CRISPR activity. Accordingly, thermodynamic prediction algoithms are used to predict strengths of binding on target and off target. Alternatively or in addition, selection methods are used to reduce or minimize off-target effects, by absolute measures or relative to on-target effects.

[0324] Design options include, without limitation, i) adjusting the length of protector strand that binds to the protected strand, ii) adjusting the length of the portion of the protected strand that is exposed, iii) extending the protected strand with a stem-loop located external (distal) to the protected strand (i.e. designed so that the stem loop is external to the protected strand at the distal end), iv) extending the protected strand by addition of a protector strand to form a stem-loop with all or part of the protected strand, v) adjusting binding of the protector strand to the protected strand by designing in one or more base mismatches and/or one or more non-canonical base pairings, vi) adjusting the location of the stem formed by hybridization of the protector strand to the protected strand, and vii) addition of a non-structured protector to the end of the protected strand. In one aspect, the invention provides an engineered, non-naturally occurring CRISPR-Cas system comprising a Cas13 protein and a protected guide RNA that targets a DNA molecule encoding a gene product in a cell, whereby the protected guide RNA targets the DNA molecule encoding the gene product and the Cas13 protein cleaves the DNA molecule encoding the gene product, whereby expression of the gene product is altered; and, wherein the Cas13 protein and the protected guide RNA do not naturally occur together. The invention comprehends the protected guide RNA comprising a guide sequence fused to a direct repeat sequence. The invention further comprehends the Cas13CRISPR protein being codon optimized for expression in a eukaryotic cell. In a preferred embodiment the eukaryotic cell is a mammalian cell, a plant cell or a yeast cell and in a more preferred embodiment the mammalian cell is a human cell. In a further embodiment of the invention, the expression of the gene product is decreased. In some embodiments the CRISPR protein is Cas13. In some embodiments the CRISPR protein is Cas12a. In some embodiments, the Cas13Cas12a protein is Acidaminococcus sp. BV3L6, Lachnospiraceae bacterium or Francisella Novicida Cas13Cas12a, and may include mutated Cas12a derived from these organisms. The protein may be a further Cas9 or Cas12a homolog or ortholog. In some embodiments, the nucleotide sequence encoding the Csa9 or Cas12a protein is codon-optimized for expression in a eukaryotic cell. In some embodiments, the Cas13 or Cas12a protein directs cleavage of one or two strands at the location of the target sequence. In some embodiments, the first regulatory element is a polymerase III promoter. In some embodiments, the second regulatory element is a polymerase II promoter. In general, and throughout this specification, the term “vector” refers to a nucleic acid molecule capable of transporting another nucleic acid to which it has been linked. Vectors include, but are not limited to, nucleic acid molecules that are single-stranded, double-stranded, or partially double-stranded; nucleic acid molecules that comprise one or more free ends, no free ends (e.g., circular); nucleic acid molecules that comprise DNA, RNA, or both; and other varieties of polynucleotides known in the art. One type of vector is a “plasmid,” which refers to a circular double stranded DNA loop into which additional DNA segments can be inserted, such as by standard molecular cloning techniques. Another type of vector is a viral vector, wherein virally-derived DNA or RNA sequences are present in the vector for packaging into a virus (e.g., retroviruses, replication defective retroviruses, adenoviruses, replication defective adenoviruses, and adeno-associated viruses). Viral vectors also include polynucleotides carried by a virus for transfection into a host cell. Certain vectors are capable of autonomous replication in a host cell into which they are introduced (e.g., bacterial vectors having a bacterial origin of replication and episomal mammalian vectors). Other vectors (e.g., non-episomal mammalian vectors) are integrated into the genome of a host cell upon introduction into the host cell, and thereby are replicated along with the host genome. Moreover, certain vectors are capable of directing the expression of genes to which they are operatively-linked. Such vectors are referred to herein as “expression vectors.” Common expression vectors of utility in recombinant DNA techniques are often in the form of plasmids.

[0325] Recombinant expression vectors can comprise a nucleic acid of the invention in a form suitable for expression of the nucleic acid in a host cell, which means that the recombinant expression vectors include one or more regulatory elements, which may be selected on the basis of the host cells to be used for expression, that is operatively-linked to the nucleic acid sequence to be expressed. Within a recombinant expression vector, “operably linked” is intended to mean that the nucleotide sequence of interest is linked to the regulatory element(s) in a manner that allows for expression of the nucleotide sequence (e.g., in an in vitro transcription/translation system or in a host cell when the vector is introduced into the host cell).

[0326] Advantageous vectors include lentiviruses and adeno-associated viruses, and types of such vectors can also be selected for targeting particular types of cells.

[0327] In one aspect, the invention provides a eukaryotic host cell comprising (a) a first regulatory element operably linked to a direct repeat sequence and one or more insertion sites for inserting one or more guide sequences downstream of the direct repeat sequence, wherein when expressed, the guide sequence directs sequence-specific binding of a CRISPR complex to a target sequence in a eukaryotic cell, wherein the CRISPR complex comprises a CRISPR enzyme complexed with the guide RNA comprising the guide sequence that is hybridized to the target sequence and/or (b) a second regulatory element operably linked to an enzyme-coding sequence encoding said Cas13 enzyme comprising a nuclear localization sequence.

[0328] In some embodiments, the host cell comprises components (a) and (b). In some embodiments, component (a), component (b), or components (a) and (b) are stably integrated into a genome of the host eukaryotic cell. In some embodiments, component (a) further comprises two or more guide sequences operably linked to the first regulatory element, wherein when expressed, each of the two or more guide sequences direct sequence specific binding of a CRISPR complex to a different target sequence in a eukaryotic cell. In some embodiments, the Cas13 enzyme directs cleavage of one or two strands at the location of the target sequence. In some embodiments, the Cas13 enzyme lacks DNA strand cleavage activity. In some embodiments, the first regulatory element is a polymerase III promoter. In some embodiments, the second regulatory element is a polymerase II promoter.

[0329] In an aspect, the invention provides a non-human eukaryotic organism; preferably a multicellular eukaryotic organism, comprising a eukaryotic host cell according to any of the described embodiments. In other aspects, the invention provides a eukaryotic organism; preferably a multicellular eukaryotic organism, comprising a eukaryotic host cell according to any of the described embodiments. The organism in some embodiments of these aspects may be an animal; for example a mammal. Also, the organism may be an arthropod such as an insect. The organism also may be a plant or a yeast. Further, the organism may be a fungus.

[0330] In one aspect, the invention provides a kit comprising one or more of the components described herein above. In some embodiments, the kit comprises a vector system and instructions for using the kit. In some embodiments, the vector system comprises (a) a first regulatory element operably linked to a direct repeat sequence and one or more insertion sites for inserting one or more guide sequences downstream of the direct repeat sequence, wherein when expressed, the guide sequence directs sequence-specific binding of a Cas13 CRISPR complex to a target sequence in a eukaryotic cell, wherein the CRISPR complex comprises a Cas13 enzyme complexed with the protected guide RNA comprising the guide sequence that is hybridized to the target sequence and/or (b) a second regulatory element operably linked to an enzyme-coding sequence encoding said Cas13 enzyme comprising a nuclear localization sequence. In some embodiments, the kit comprises components (a) and (b) located on the same or different vectors of the system. In some embodiments, component (a) further comprises two or more guide sequences operably linked to the first regulatory element, wherein when expressed, each of the two or more guide sequences direct sequence specific binding of a CRISPR complex to a different target sequence in a eukaryotic cell. In some embodiments, the Cas13 enzyme comprises one or more nuclear localization sequences of sufficient strength to drive accumulation of said Cas13 enzyme in a detectable amount in the nucleus of a eukaryotic cell. The enzyme may be a Cas9 homolog or ortholog. In some embodiments, the CRISPR enzyme is codon-optimized for expression in a eukaryotic cell. In some embodiments, the CRISPR enzyme directs cleavage of one or two strands at the location of the target sequence. In some embodiments, the CRISPR enzyme lacks DNA strand cleavage activity. In some embodiments, the first regulatory element is a polymerase III promoter. In some embodiments, the second regulatory element is a polymerase II promoter.

[0331] In one aspect, the invention provides a method of modifying a target polynucleotide in a eukaryotic cell. In some embodiments, the method comprises allowing a CRISPR complex to bind to the target polynucleotide to effect cleavage of said target polynucleotide thereby modifying the target polynucleotide, wherein the CRISPR complex comprises a Cas13 enzyme complexed with protected guide RNA comprising a guide sequence hybridized to a target sequence within said target polynucleotide. In some embodiments, said cleavage comprises cleaving one or two strands at the location of the target sequence by said Cas13 enzyme. In some embodiments, said cleavage results in decreased transcription of a target gene. In some embodiments, the method further comprises repairing said cleaved target polynucleotide by non-homologous end joining (NHEJ)-based gene insertion mechanisms, more particularly with an exogenous template polynucleotide, wherein said repair results in a mutation comprising an insertion, deletion, or substitution of one or more nucleotides of said target polynucleotide. In some embodiments, said mutation results in one or more amino acid changes in a protein expressed from a gene comprising the target sequence. In some embodiments, the method further comprises delivering one or more vectors to said eukaryotic cell, wherein the one or more vectors drive expression of one or more of: the Cas13 enzyme, the protected guide RNA comprising the guide sequence linked to direct repeat sequence. In some embodiments, said vectors are delivered to the eukaryotic cell in a subject. In some embodiments, said modifying takes place in said eukaryotic cell in a cell culture. In some embodiments, the method further comprises isolating said eukaryotic cell from a subject prior to said modifying. In some embodiments, the method further comprises returning said eukaryotic cell and/or cells derived therefrom to said subject.

[0332] In one aspect, the invention provides a method of modifying expression of a polynucleotide in a eukaryotic cell. In some embodiments, the method comprises allowing a Cas13 CRISPR complex to bind to the polynucleotide such that said binding results in increased or decreased expression of said polynucleotide; wherein the CRISPR complex comprises a Cas13 enzyme complexed with a protected guide RNA comprising a guide sequence hybridized to a target sequence within said polynucleotide. In some embodiments, the method further comprises delivering one or more vectors to said eukaryotic cells, wherein the one or more vectors drive expression of one or more of: the Cas13 enzyme and the protected guide RNA.

[0333] In one aspect, the invention provides a method of generating a model eukaryotic cell comprising a mutated disease gene. In some embodiments, a disease gene is any gene associated an increase in the risk of having or developing a disease. In some embodiments, the method comprises (a) introducing one or more vectors into a eukaryotic cell, wherein the one or more vectors drive expression of one or more of: a Cas13 enzyme and a protected guide RNA comprising a guide sequence linked to a direct repeat sequence; and (b) allowing a CRISPR complex to bind to a target polynucleotide to effect cleavage of the target polynucleotide within said disease gene, wherein the CRISPR complex comprises the Cas13 enzyme complexed with the guide RNA comprising the sequence that is hybridized to the target sequence within the target polynucleotide, thereby generating a model eukaryotic cell comprising a mutated disease gene. In some embodiments, said cleavage comprises cleaving one or two strands at the location of the target sequence by said Cas13 enzyme. In some embodiments, said cleavage results in decreased transcription of a target gene. In some embodiments, the method further comprises repairing said cleaved target polynucleotide by non-homologous end joining (NHEJ)-based gene insertion mechanisms with an exogenous template polynucleotide, wherein said repair results in a mutation comprising an insertion, deletion, or substitution of one or more nucleotides of said target polynucleotide. In some embodiments, said mutation results in one or more amino acid changes in a protein expression from a gene comprising the target sequence.

[0334] In one aspect, the invention provides a method for developing a biologically active agent that modulates a cell signaling event associated with a disease gene. In some embodiments, a disease gene is any gene associated an increase in the risk of having or developing a disease. In some embodiments, the method comprises (a) contacting a test compound with a model cell of any one of the described embodiments; and (b) detecting a change in a readout that is indicative of a reduction or an augmentation of a cell signaling event associated with said mutation in said disease gene, thereby developing said biologically active agent that modulates said cell signaling event associated with said disease gene.

[0335] In one aspect, the invention provides a recombinant polynucleotide comprising a protected guide sequence downstream of a direct repeat sequence, wherein the protected guide sequence when expressed directs sequence-specific binding of a CRISPR complex to a corresponding target sequence present in a eukaryotic cell. In some embodiments, the target sequence is a viral sequence present in a eukaryotic cell. In some embodiments, the target sequence is a proto-oncogene or an oncogene.

[0336] In one aspect the invention provides for a method of selecting one or more cell(s) by introducing one or more mutations in a gene in the one or more cell (s), the method comprising: introducing one or more vectors into the cell (s), wherein the one or more vectors drive expression of one or more of: a Cas13 enzyme, a protected guide RNA comprising a guide sequence, and an editing template; wherein the editing template comprises the one or more mutations that abolish Cas13 enzyme cleavage; allowing non-homologous end joining (NHEJ)-based gene insertion mechanisms of the editing template with the target polynucleotide in the cell(s) to be selected; allowing a CRISPR complex to bind to a target polynucleotide to effect cleavage of the target polynucleotide within said gene, wherein the CRISPR complex comprises the Cas13 enzyme complexed with the protected guide RNA comprising a guide sequence that is hybridized to the target sequence within the target polynucleotide, wherein binding of the CRISPR complex to the target polynucleotide induces cell death, thereby allowing one or more cell(s) in which one or more mutations have been introduced to be selected. In a preferred embodiment of the invention the cell to be selected may be a eukaryotic cell. Aspects of the invention allow for selection of specific cells without requiring a selection marker or a two-step process that may include a counter-selection system.

[0337] With respect to mutations of the Cas13 enzyme, when the enzyme is not FnCas13, mutations may be as described herein elsewhere; conservative substitution for any of the replacement amino acids is also envisaged. In an aspect the invention provides as to any or each or all embodiments herein-discussed wherein the CRISPR enzyme comprises at least one or more, or at least two or more mutations, wherein the at least one or more mutation or the at least two or more mutations are selected from those described herein elsewhere.

[0338] In a further aspect, the invention involves a computer-assisted method for identifying or designing potential compounds to fit within or bind to CRISPR-Cas13 system or a functional portion thereof or vice versa (a computer-assisted method for identifying or designing potential CRISPR-Cas13 systems or a functional portion thereof for binding to desired compounds) or a computer-assisted method for identifying or designing potential CRISPR-Cas13 systems (e.g., with regard to predicting areas of the CRISPR-Cas13 system to be able to be manipulated—for instance, based on crystal structure data or based on data of Cas13 orthologs, or with respect to where a functional group such as an activator or repressor can be attached to the CRISPR-Cas13 system, or as to Cas13 truncations or as to designing nickases), said method comprising:

[0339] using a computer system, e.g., a programmed computer comprising a processor, a data storage system, an input device, and an output device, the steps of:
[0340] (a) inputting into the programmed computer through said input device data comprising the three-dimensional co-ordinates of a subset of the atoms from or pertaining to the CRISPR-Cas13 crystal structure, e.g., in the CRISPR-Cas13 system binding domain or alternatively or additionally in domains that vary based on variance among Cas13 orthologs or as to Cas or as to nickases or as to functional groups, optionally with structural information from CRISPR-Cas13 system complex(es), thereby generating a data set;
[0341] (b) comparing, using said processor, said data set to a computer database of structures stored in said computer data storage system, e.g., structures of compounds that bind or putatively bind or that are desired to bind to a CRISPR-Cas13 system or as to Cas13 orthologs (e.g., as Cas13s or as to domains or regions that vary amongst Cas13 orthologs) or as to the CRISPR-Cas13 crystal structure or as to nickases or as to functional groups;
[0342] (c) selecting from said database, using computer methods, structure(s)—e.g., CRISPR-Cas13 structures that may bind to desired structures, desired structures that may bind to certain CRISPR-Cas13 structures, portions of the CRISPR-Cas13 system that may be manipulated, e.g., based on data from other portions of the CRISPR-Cas13 crystal structure and/or from Cas13 orthologs, truncated Cas13s, novel nickases or particular functional groups, or positions for attaching functional groups or functional-group-CRISPR-Cas13 systems;
[0343] (d) constructing, using computer methods, a model of the selected structure(s); and
[0344] (e) outputting to said output device the selected structure(s);
[0345] and optionally synthesizing one or more of the selected structure(s);
[0346] and further optionally testing said synthesized selected structure(s) as or in a CRISPR-Cas13 system;
[0347] or, said method comprising: providing the co-ordinates of at least two atoms of the CRISPR-Cas13 crystal structure, e.g., at least two atoms of the herein Crystal Structure Table of the CRISPR-Cas13 crystal structure or co-ordinates of at least a sub-domain of the CRISPR-Cas13 crystal structure (“selected co-ordinates”), providing the structure of a candidate comprising a binding molecule or of portions of the CRISPR-Cas13 system that may be manipulated, e.g., based on data from other portions of the CRISPR-Cas13 crystal structure and/or from Cas13 orthologs, or the structure of functional groups, and fitting the structure of the candidate to the selected co-ordinates, to thereby obtain product data comprising CRISPR-Cas13 structures that may bind to desired structures, desired structures that may bind to certain CRISPR-Cas13 structures, portions of the CRISPR-Cas13 system that may be manipulated, truncated Cas13s, novel nickases, or particular functional groups, or positions for attaching functional groups or functional-group-CRISPR-Cas13 systems, with output thereof; and optionally synthesizing compound(s) from said product data and further optionally comprising testing said synthesized compound(s) as or in a CRISPR-Cas13 system.

[0348] The testing can comprise analyzing the CRISPR-Cas13 system resulting from said synthesized selected structure(s), e.g., with respect to binding, or performing a desired function.

[0349] The output in the foregoing methods can comprise data transmission, e.g., transmission of information via telecommunication, telephone, video conference, mass communication, e.g., presentation such as a computer presentation (e.g. POWERPOINT), internet, email, documentary communication such as a computer program (e.g. WORD) document and the like. Accordingly, the invention also comprehends computer readable media containing: atomic co-ordinate data according to the herein-referenced Crystal Structure, said data defining the three dimensional structure of CRISPR-Cas13 or at least one sub-domain thereof, or structure factor data for CRISPR-Cas13, said structure factor data being derivable from the atomic co-ordinate data of herein-referenced Crystal Structure. The computer readable media can also contain any data of the foregoing methods. The invention further comprehends methods a computer system for generating or performing rational design as in the foregoing methods containing either: atomic co-ordinate data according to herein-referenced Crystal Structure, said data defining the three dimensional structure of CRISPR-Cas13 or at least one sub-domain thereof, or structure factor data for CRISPR-Cas13, said structure factor data being derivable from the atomic co-ordinate data of herein-referenced Crystal Structure. The invention further comprehends a method of doing business comprising providing to a user the computer system or the media or the three dimensional structure of CRISPR-Cas13 or at least one sub-domain thereof, or structure factor data for CRISPR-Cas13, said structure set forth in and said structure factor data being derivable from the atomic co-ordinate data of herein-referenced Crystal Structure, or the herein computer media or a herein data transmission.

[0350] A “binding site” or an “active site” comprises or consists essentially of or consists of a site (such as an atom, a functional group of an amino acid residue or a plurality of such atoms and/or groups) in a binding cavity or region, which may bind to a compound such as a nucleic acid molecule, which is/are involved in binding.

[0351] By “fitting”, is meant determining by automatic, or semi-automatic means, interactions between one or more atoms of a candidate molecule and at least one atom of a structure of the invention, and calculating the extent to which such interactions are stable. Interactions include attraction and repulsion, brought about by charge, steric considerations and the like. Various computer-based methods for fitting are described further

[0352] By “root mean square (or rms) deviation”, we mean the square root of the arithmetic mean of the squares of the deviations from the mean.

[0353] By a “computer system”, is meant the hardware means, software means and data storage means used to analyze atomic coordinate data. The minimum hardware means of the computer-based systems of the present invention typically comprises a central processing unit (CPU), input means, output means and data storage means. Desirably a display or monitor is provided to visualize structure data. The data storage means may be RAM or means for accessing computer readable media of the invention. Examples of such systems are computer and tablet devices running Unix, Windows or Apple operating systems.

[0354] By “computer readable media”, is meant any medium or media, which can be read and accessed directly or indirectly by a computer e.g., so that the media is suitable for use in the above-mentioned computer system. Such media include, but are not limited to: magnetic storage media such as floppy discs, hard disc storage medium and magnetic tape; optical storage media such as optical discs or CD-ROM; electrical storage media such as RAM and ROM; thumb drive devices; cloud storage devices and hybrids of these categories such as magnetic/optical storage media.

[0355] The invention comprehends the use of the protected guides described herein above in the optimized functional CRISPR-Cas enzyme systems described herein.

[0356] The nucleic acid molecule encoding a Cas is advantageously codon optimized Cas. An example of a codon optimized sequence, is in this instance a sequence optimized for expression in a eukaryote, e.g., humans (i.e. being optimized for expression in humans), or for another eukaryote, animal or mammal as herein discussed; see, e.g., SaCas9 human codon optimized sequence in WO 2014/093622 (PCT/US2013/074667). Whilst this is preferred, it will be appreciated that other examples are possible and codon optimization for a host species other than human, or for codon optimization for specific organs is known. In some embodiments, an enzyme coding sequence encoding a Cas is codon optimized for expression in particular cells, such as eukaryotic cells. The eukaryotic cells may be those of or derived from a particular organism, such as a mammal, including but not limited to human, or non-human eukaryote or animal or mammal as herein discussed, e.g., mouse, rat, rabbit, dog, livestock, or non-human mammal or primate. In some embodiments, processes for modifying the germ line genetic identity of human beings and/or processes for modifying the genetic identity of animals which are likely to cause them suffering without any substantial medical benefit to man or animal, and also animals resulting from such processes, may be excluded. In general, codon optimization refers to a process of modifying a nucleic acid sequence for enhanced expression in the host cells of interest by replacing at least one codon (e.g. about or more than about 1, 2, 3, 4, 5, 10, 15, 20, 25, 50, or more codons) of the native sequence with codons that are more frequently or most frequently used in the genes of that host cell while maintaining the native amino acid sequence. Various species exhibit particular bias for certain codons of a particular amino acid. Codon bias (differences in codon usage between organisms) often correlates with the efficiency of translation of messenger RNA (mRNA), which is in turn believed to be dependent on, among other things, the properties of the codons being translated and the availability of particular transfer RNA (tRNA) molecules. The predominance of selected tRNAs in a cell is generally a reflection of the codons used most frequently in peptide synthesis. Accordingly, genes can be tailored for optimal gene expression in a given organism based on codon optimization. Codon usage tables are readily available, for example, at the “Codon Usage Database” available at www.kazusa.orjp/codon/and these tables can be adapted in a number of ways. See Nakamura, Y., et al. “Codon usage tabulated from the international DNA sequence databases: status for the year 2000” Nucl. Acids Res. 28:292 (2000). Computer algorithms for codon optimizing a particular sequence for expression in a particular host cell are also available, such as Gene Forge (Aptagen; Jacobus, P A), are also available. In some embodiments, one or more codons (e.g. 1, 2, 3, 4, 5, 10, 15, 20, 25, 50, or more, or all codons) in a sequence encoding a Cas correspond to the most frequently used codon for a particular amino acid.

[0357] In certain embodiments, the methods as described herein may comprise providing a Cas transgenic cell in which one or more nucleic acids encoding one or more guide RNAs are provided or introduced operably connected in the cell with a regulatory element comprising a promoter of one or more gene of interest. As used herein, the term “Cas transgenic cell” refers to a cell, such as a eukaryotic cell, in which a Cas gene has been genomically integrated. The nature, type, or origin of the cell are not particularly limiting according to the present invention. Also the way how the Cas transgene is introduced in the cell is may vary and can be any method as is known in the art. In certain embodiments, the Cas transgenic cell is obtained by introducing the Cas transgene in an isolated cell. In certain other embodiments, the Cas transgenic cell is obtained by isolating cells from a Cas transgenic organism. By means of example, and without limitation, the Cas transgenic cell as referred to herein may be derived from a Cas transgenic eukaryote, such as a Cas knock-in eukaryote. Reference is made to WO 2014/093622 (PCT/US13/74667), incorporated herein by reference. Methods of US Patent Publication Nos. 20120017290 and 20110265198 assigned to Sangamo BioSciences, Inc. directed to targeting the Rosa locus may be modified to utilize the CRISPR Cas system of the present invention. Methods of US Patent Publication No. 20130236946 assigned to Cellectis directed to targeting the Rosa locus may also be modified to utilize the CRISPR Cas system of the present invention. By means of further example reference is made to Platt et. al. (Cell; 159(2):440-455 (2014)), describing a Cas9 knock-in mouse, which is incorporated herein by reference. The Cas transgene can further comprise a Lox-Stop-polyA-Lox(LSL) cassette thereby rendering Cas expression inducible by Cre recombinase. Alternatively, the Cas transgenic cell may be obtained by introducing the Cas transgene in an isolated cell. Delivery systems for transgenes are well known in the art. By means of example, the Cas transgene may be delivered in for instance eukaryotic cell by means of vector (e.g., AAV, adenovirus, lentivirus) and/or particle and/or nanoparticle delivery, as also described herein elsewhere.

[0358] It will be understood by the skilled person that the cell, such as the Cas transgenic cell, as referred to herein may comprise further genomic alterations besides having an integrated Cas gene or the mutations arising from the sequence specific action of Cas when complexed with RNA capable of guiding Cas to a target locus, such as for instance one or more oncogenic mutations, as for instance and without limitation described in Platt et al. (2014), Chen et al., (2014) or Kumar et al. (2009).

[0359] In some embodiments, the Cas sequence is fused to one or more nuclear localization sequences (NLSs) or nuclear export signals (NESs), such as about or more than about 1, 2, 3, 4, 5, 6, 7, 8, 9, 10, or more NLSs or NESs. In some embodiments, the Cas comprises about or more than about 1, 2, 3, 4, 5, 6, 7, 8, 9, 10, or more NLSs or NESs at or near the amino-terminus, about or more than about 1, 2, 3, 4, 5, 6, 7, 8, 9, 10, or more NLSs or NESs at or near the carboxy-terminus, or a combination of these (e.g. zero or at least one or more NLS or NES at the amino-terminus and zero or at one or more NLS or NES at the carboxy terminus). When more than one NLS or NES is present, each may be selected independently of the others, such that a single NLS or NES may be present in more than one copy and/or in combination with one or more other NLSs or NESs present in one or more copies. In a preferred embodiment of the invention, the Cas comprises at most 6 NLSs. In some embodiments, an NLS or NES is considered near the N- or C-terminus when the nearest amino acid of the NLS or NES is within about 1, 2, 3, 4, 5, 10, 15, 20, 25, 30, 40, 50, or more amino acids along the polypeptide chain from the N- or C-terminus. Non-limiting examples of NLSs include an NLS sequence derived from: the NLS of the SV40 virus large T-antigen, having the amino acid sequence PKKKRKV (SEQ ID NO: 1); the NLS from nucleoplasmin (e.g. the nucleoplasmin bipartite NLS with the sequence KRPAATKKAGQAKKKK) (SEQ ID NO:2); the c-myc NLS having the amino acid sequence PAAKRVKLD (SEQ ID NO: 3) or RQRRNELKRSP (SEQ ID NO:4); the hRNPA1 M9 NLS having the sequence NQSSNFGPMKGGNFGGRSSGPYGGGGQYFAKPRNQGGY(SEQ ID NO: 5); the sequence RMRIZFKNKGKDTAELRRRRVEVSVELRKAKKDEQILKRRNV (SEQ ID NO: 6) of the IBB domain from importin-alpha; the sequences VSRKRPRP (SEQ ID NO: 7) and PPKKARED (SEQ ID NO: 8) of the myoma T protein; the sequence POPKKKPL (SEQ ID No: 9) of human p53; the sequence SALIKKKKKMAP (SEQ ID No: 10) of mouse c-abl IV; the sequences DRLRR (SEQ ID NO: 11) and PKQKKRK (SEQ ID No.: 12) of the influenza virus NS1; the sequence RKLKKKIKKL (SEQ ID NO: 13) of the Hepatitis virus delta antigen; the sequence REKKKFLKRR (SEQ ID No.: 14) of the mouse Mx1 protein; the sequence KRKGDEVDGVDEVAKKKSKK (SEQ ID No: 15) of the human poly(ADP-ribose) polymerase; and the sequence RKCLQAGMNLEARKTKK (SEQ ID No: 16) of the steroid hormone receptors (human) glucocorticoid. Non-limiting examples of NESs include an NES sequence LYPERLRRILT (SEQ ID No. 17) (ctgtaccctgagcggctgcggcggatcctgacc (SEQ ID No 18)). In general, the one or more NLSs or NESs are of sufficient strength to drive accumulation of the Cas in a detectable amount in respectively the nucleus or the cytoplasm of a eukaryotic cell. In general, strength of nuclear localization/export activity may derive from the number of NLSs/NESs in the Cas, the particular NLS(s) or NES(s) used, or a combination of these factors. Detection of accumulation in the nucleus/cytoplasm may be performed by any suitable technique. For example, a detectable marker may be fused to the Cas, such that location within a cell may be visualized, such as in combination with a means for detecting the location of the nucleus (e.g. a stain specific for the nucleus such as DAPI) or cytoplasm. Cell nuclei may also be isolated from cells, the contents of which may then be analyzed by any suitable process for detecting protein, such as immunohistochemistry, Western blot, or enzyme activity assay. Accumulation in the nucleus may also be determined indirectly, such as by an assay for the effect of CRISPR complex formation (e.g. assay for RNA cleavage or mutation at the target sequence, or assay for altered gene expression activity affected by CRISPR complex formation and/or Cas enzyme activity), as compared to a control no exposed to the Cas or complex, or exposed to a Cas lacking the one or more NLSs or NESs. In certain embodiments, other localization tags may be fused to the Cas protein, such as without limitation for localizing the Cas to particular sites in a cell, such as organells, such mitochondria, plastids, chloroplast, vesicles, golgi, (nuclear or cellular) membranes, ribosomes, nucleoluse, ER, cytoskeleton, vacuoles, centrosome, nucleosome, granules, centrioles, etc.

[0360] In certain aspects the invention involves vectors, e.g. for delivering or introducing in a cell Cas and/or RNA capable of guiding Cas to a target locus (i.e. guide RNA), but also for propagating these components (e.g. in prokaryotic cells). A used herein, a “vector” is a tool that allows or facilitates the transfer of an entity from one environment to another. It is a replicon, such as a plasmid, phage, or cosmid, into which another DNA segment may be inserted so as to bring about the replication of the inserted segment. Generally, a vector is capable of replication when associated with the proper control elements. In general, the term “vector” refers to a nucleic acid molecule capable of transporting another nucleic acid to which it has been linked. Vectors include, but are not limited to, nucleic acid molecules that are single-stranded, double-stranded, or partially double-stranded; nucleic acid molecules that comprise one or more free ends, no free ends (e.g. circular); nucleic acid molecules that comprise DNA, RNA, or both; and other varieties of polynucleotides known in the art. One type of vector is a “plasmid,” which refers to a circular double stranded DNA loop into which additional DNA segments can be inserted, such as by standard molecular cloning techniques. Another type of vector is a viral vector, wherein virally-derived DNA or RNA sequences are present in the vector for packaging into a virus (e.g. retroviruses, replication defective retroviruses, adenoviruses, replication defective adenoviruses, and adeno-associated viruses (AAVs)). Viral vectors also include polynucleotides carried by a virus for transfection into a host cell. Certain vectors are capable of autonomous replication in a host cell into which they are introduced (e.g. bacterial vectors having a bacterial origin of replication and episomal mammalian vectors). Other vectors (e.g., non-episomal mammalian vectors) are integrated into the genome of a host cell upon introduction into the host cell, and thereby are replicated along with the host genome. Moreover, certain vectors are capable of directing the expression of genes to which they are operatively-linked. Such vectors are referred to herein as “expression vectors.” Common expression vectors of utility in recombinant DNA techniques are often in the form of plasmids.

[0361] Recombinant expression vectors can comprise a nucleic acid of the invention in a form suitable for expression of the nucleic acid in a host cell, which means that the recombinant expression vectors include one or more regulatory elements, which may be selected on the basis of the host cells to be used for expression, that is operatively-linked to the nucleic acid sequence to be expressed. Within a recombinant expression vector, “operably linked” is intended to mean that the nucleotide sequence of interest is linked to the regulatory element(s) in a manner that allows for expression of the nucleotide sequence (e.g. in an in vitro transcription/translation system or in a host cell when the vector is introduced into the host cell). With regards to recombination and cloning methods, mention is made of U.S. patent application Ser. No. 10/815,730, published Sep. 2, 2004 as US 2004-0171156 A1, the contents of which are herein incorporated by reference in their entirety.

[0362] The vector(s) can include the regulatory element(s), e.g., promoter(s). The vector(s) can comprise Cas encoding sequences, and/or a single, but possibly also can comprise at least 3 or 8 or 16 or 32 or 48 or 50 guide RNA(s) (e.g., sgRNAs) encoding sequences, such as 1-2, 1-3, 1-4 1-5, 3-6, 3-7, 3-8, 3-9, 3-10, 3-8, 3-16, 3-30, 3-32, 3-48, 3-50 RNA(s) (e.g., sgRNAs). In a single vector there can be a promoter for each RNA (e.g., sgRNA), advantageously when there are up to about 16 RNA(s); and, when a single vector provides for more than 16 RNA(s), one or more promoter(s) can drive expression of more than one of the RNA(s), e.g., when there are 32 RNA(s), each promoter can drive expression of two RNA(s), and when there are 48 RNA(s), each promoter can drive expression of three RNA(s). By simple arithmetic and well established cloning protocols and the teachings in this disclosure one skilled in the art can readily practice the invention as to the RNA(s) for a suitable exemplary vector such as AAV, and a suitable promoter such as the U6 promoter. For example, the packaging limit of AAV is −4.7 kb. The length of a single U6-gRNA (plus restriction sites for cloning) is 361 bp. Therefore, the skilled person can readily fit about 12-16, e.g., 13 U6-gRNA cassettes in a single vector. This can be assembled by any suitable means, such as a golden gate strategy used for TALE assembly (www.genome-engineering.org/taleffectors/). The skilled person can also use a tandem guide strategy to increase the number of U6-gRNAs by approximately 1.5 times, e.g., to increase from 12-16, e.g., 13 to approximately 18-24, e.g., about 19 U6-gRNAs. Therefore, one skilled in the art can readily reach approximately 18-24, e.g., about 19 promoter-RNAs, e.g., U6-gRNAs in a single vector, e.g., an AAV vector. A further means for increasing the number of promoters and RNAs in a vector is to use a single promoter (e.g., U6) to express an array of RNAs separated by cleavable sequences. And an even further means for increasing the number of promoter-RNAs in a vector, is to express an array of promoter-RNAs separated by cleavable sequences in the intron of a coding sequence or gene; and, in this instance it is advantageous to use a polymerase II promoter, which can have increased expression and enable the transcription of long RNA in a tissue specific manner. (see, e.g., nar.oxfordjournals.org/content/34/7/e53.short, www.nature.com/mt/journal/v16/n9/abs/mt2008144a.html). In an advantageous embodiment, AAV may package U6 tandem gRNA targeting up to about 50 genes. Accordingly, from the knowledge in the art and the teachings in this disclosure the skilled person can readily make and use vector(s), e.g., a single vector, expressing multiple RNAs or guides under the control or operatively or functionally linked to one or more promoters—especially as to the numbers of RNAs or guides discussed herein, without any undue experimentation.

[0363] The guide RNA(s) encoding sequences and/or Cas encoding sequences, can be functionally or operatively linked to regulatory element(s) and hence the regulatory element(s) drive expression. The promoter(s) can be constitutive promoter(s) and/or conditional promoter(s) and/or inducible promoter(s) and/or tissue specific promoter(s). The promoter can be selected from the group consisting of RNA polymerases, pol I, pol II, pol III, T7, U6, H1, retroviral Rous sarcoma virus (RSV) LTR promoter, the cytomegalovirus (CMV) promoter, the SV40 promoter, the dihydrofolate reductase promoter, the β-actin promoter, the phosphoglycerol kinase (PGK) promoter, and the EFla promoter. An advantageous promoter is the promoter is U6.

[0364] Aspects of the invention relate to the identification and engineering of novel effector proteins associated with Class 2 CRISPR-Cas systems. In a preferred embodiment, the effector protein comprises a single-subunit effector module. In a further embodiment the effector protein is functional in prokaryotic or eukaryotic cells for in vitro, in vivo or ex vivo applications. An aspect of the invention encompasses computational methods and algorithms to predict new Class 2 CRISPR-Cas systems and identify the components therein.

[0365] In one embodiment, a computational method of identifying novel Class 2 CRISPR-Cas loci comprises the following steps: detecting all contigs encoding the Cas1 protein; identifying all predicted protein coding genes within 20 kB of the cas1 gene, more particularly within the region 20 kb from the start of the cas1 gene and 20 kb from the end of the cas1 gene; comparing the identified genes with Cas protein-specific profiles and predicting CRISPR arrays; selecting partial and/or unclassified candidate CRISPR-Cas loci containing proteins larger than 500 amino acids (>500 aa); analyzing selected candidates using PSI-BLAST and HHPred, thereby isolating and identifying novel Class 2 CRISPR-Cas loci. In addition to the above mentioned steps, additional analysis of the candidates may be conducted by searching metagenomics databases for additional homologs.

[0366] In one aspect the detecting all contigs encoding the Cas1 protein is performed by GenemarkS which a gene prediction program as further described in “GeneMarkS: a self-training method for prediction of gene starts in microbial genomes. Implications for finding sequence motifs in regulatory regions.” John Besemer, Alexandre Lomsadze and Mark Borodovsky, Nucleic Acids Research (2001) 29, pp 2607-2618, herein incorporated by reference.

[0367] In one aspect the identifying all predicted protein coding genes is carried out by comparing the identified genes with Cas protein-specific profiles and annotating them according to NCBI Conserved Domain Database (CDD) which is a protein annotation resource that consists of a collection of well-annotated multiple sequence alignment models for ancient domains and full-length proteins. These are available as position-specific score matrices (PSSMs) for fast identification of conserved domains in protein sequences via RPS-BLAST. CDD content includes NCBI-curated domains, which use 3D-structure information to explicitly define domain boundaries and provide insights into sequence/structure/function relationships, as well as domain models imported from a number of external source databases (Pfam, SMART, COG, PRK, TIGRFAM). In a further aspect, CRISPR arrays were predicted using a PILER-CR program which is a public domain software for finding CRISPR repeats as described in “PILER-CR: fast and accurate identification of CRISPR repeats”, Edgar, R. C., BMC Bioinformatics, January 20; 8:18(2007), herein incorporated by reference.

[0368] In a further aspect, the case by case analysis is performed using PSI-BLAST (Position-Specific Iterative Basic Local Alignment Search Tool). PSI-BLAST derives a position-specific scoring matrix (PSSM) or profile from the multiple sequence alignment of sequences detected above a given score threshold using protein—protein BLAST. This PSSM is used to further search the database for new matches and is updated for subsequent iterations with these newly detected sequences. Thus, PSI-BLAST provides a means of detecting distant relationships between proteins.

[0369] In another aspect, the case by case analysis is performed using HHpred, a method for sequence database searching and structure prediction that is as easy to use as BLAST or PSI-BLAST and that is at the same time much more sensitive in finding remote homologs. In fact, HHpred's sensitivity is competitive with the most powerful servers for structure prediction currently available. HHpred is the first server that is based on the pairwise comparison of profile hidden Markov models (HMMs). Whereas most conventional sequence search methods search sequence databases such as UniProt or the NR, HHpred searches alignment databases, like Pfam or SMART. This greatly simplifies the list of hits to a number of sequence families instead of a clutter of single sequences. All major publicly available profile and alignment databases are available through HHpred. HHpred accepts a single query sequence or a multiple alignment as input. Within only a few minutes it returns the search results in an easy-to-read format similar to that of PSI-BLAST. Search options include local or global alignment and scoring secondary structure similarity. HHpred can produce pairwise query-template sequence alignments, merged query-template multiple alignments (e.g. for transitive searches), as well as 3D structural models calculated by the MODELLER software from HHpred alignments.

[0370] The term “nucleic acid-targeting system”, wherein nucleic acid is DNA or RNA, and in some aspects may also refer to DNA-RNA hybrids or derivatives thereof, refers collectively to transcripts and other elements involved in the expression of or directing the activity of DNA or RNA-targeting CRISPR-associated (“Cas”) genes, which may include sequences encoding a DNA or RNA-targeting Cas protein and a DNA or RNA-targeting guide RNA comprising a CRISPR RNA (crRNA) sequence and (in some but not all systems) a trans-activating CRISPR/Cas system RNA (tracrRNA) sequence, or other sequences and transcripts from a DNA or RNA-targeting CRISPR locus. In general, a RNA-targeting system is characterized by elements that promote the formation of a DNA or RNA-targeting complex at the site of a target DNA or RNA sequence. In the context of formation of a DNA or RNA-targeting complex, “target sequence” refers to a DNA or RNA sequence to which a DNA or RNA-targeting guide RNA is designed to have complementarity, where hybridization between a target sequence and a RNA-targeting guide RNA promotes the formation of a RNA-targeting complex. In some embodiments, a target sequence is located in the nucleus or cytoplasm of a cell.

[0371] In an aspect of the invention, novel RNA targeting systems also referred to as RNA- or RNA-targeting CRISPR/Cas or the CRISPR-Cas system RNA-targeting system of the present application are based on identified Type VI Cas proteins which do not require the generation of customized proteins to target specific RNA sequences but rather a single enzyme can be programmed by a RNA molecule to recognize a specific RNA target, in other words the enzyme can be recruited to a specific RNA target using said RNA molecule.

[0372] In an aspect of the invention, novel DNA targeting systems also referred to as DNA- or DNA-targeting CRISPR/Cas or the CRISPR-Cas system RNA-targeting system of the present application are based on identified Type VI Cas proteins which do not require the generation of customized proteins to target specific RNA sequences but rather a single enzyme can be programmed by a RNA molecule to recognize a specific DNA target, in other words the enzyme can be recruited to a specific DNA target using said RNA molecule.

[0373] The nucleic acids-targeting systems, the vector systems, the vectors and the compositions described herein may be used in various nucleic acids-targeting applications, altering or modifying synthesis of a gene product, such as a protein, nucleic acids cleavage, nucleic acids editing, nucleic acids splicing; trafficking of target nucleic acids, tracing of target nucleic acids, isolation of target nucleic acids, visualization of target nucleic acids, etc.

[0374] As used herein, a Cas protein or a CRISPR enzyme refers to any of the proteins presented in the new classification of CRISPR-Cas systems.

### Cas13c Nuclease

[0375] The Class 2 type VI effector protein Cas13c is a RNA-guided RNase that can be efficiently programmed to degrade ssRNA. Cas13c effector proteins of the invention include, without limitation, the following orthlog species (including multiple CRISPR loci): Fusobacterium necrophorum subsp. funduliforme ATCC 51357; Fusobacterium necrophorum DJ-2; Fusobacterium necrophorum BFTR-1; Fusobacterium necrophorum subsp. funduliforme 1_1_36S; Fusobacterium perfoetens ATCC 29250 T364; Fusobacterium ulcerans ATCC 49185; Anaerosalibacter sp. ND1; Cetobacterium sp. ZOR0034; Anaerosilobacter massiliensis; Fusobacterium varium; and Tissierella sp. P1.

[0376] Cas13c achieves RNA cleavage through conserved basic residues within its two HEPN domains. Mutation of the HEPN domain, such as (e.g. alanine) substitution of predicted HEPN domain catalytic residues can be used to convert Cas13c into an inactive programmable RNA-binding protein (dCas13c, analogous to dCas9).

[0377] According to the invention, a consensus sequence can be generated from multiple C2c2 orthologs, which can assist in locating conserved amino acid residues, and motifs, including but not limited to catalytic residues and HEPN motifs in Cas13c orthologs that mediate Cas13c function. One such consensus sequence, generated from the 33 orthologs mentioned above using Geneious alignment is:

(SEQ ID No. 19)
MKISKVXXXVXKKXXXGKLXKXVNERNRXAKRLSNXLBKYIXXIDKIXK
KEXXKKFXAXEEITLKLNQXXXBXLXKAXXDLRKDNXYSXJKKILHNED
INXEEXELLINDXLEKLXKIESXKYSYQKXXXNYXMSVQEHSKKSIXRI
XESAKRNKEALDKFLKEYAXLDPRMEXLAKLRKLLELYFYFKNDXIXXE
EEXNVXXHKXLKENHPDFVEXXXNKENAELNXYAIEXKKJLKYYFPXK
XAKNSNDKIFEKQELKKXWIHQJENAVERILLXXGKVXYKLQXGYLAEL
WKIRINEIFIKYIXVGKAVAXFALRNXXKBENDILGGKIXKKLNGITSF
XYEKIKAEEILQREXAVEVAFAANXLYAXDLXXIRXSILQFFGGASNWD
XFLFFHFATSXISDKKWNAELIXXKKJGLVIREKLYSNNVAMFYSKDDL
EKLLNXLXXFXLRASQVPSFKKVYVRXBFPQNLLKKFNDEKDDEAYSAX
YYLLKEIYYNXFLPYFSANNXFFFXVKNLVLKANKDKFXXAFXDIREMN
XGSPIEYLXXTQXNXXNEGRKKEEKEXDFIKFLLQIFXKGFDDYLKNNX
XFILKFIPEPTEXIEIXXELQAWYIVGKFLNARKXNLLGXFXSYLKLLD
DIELRALRNENIKYQSSNXEKEVLEXCLELIGLLSLDLNDYFBDEXDFA
XYJGKXLDFEKKXMKDLAELXPYDQNDGENPIVNRNIXLAKKYGTLNLL
EKJXDKVSEKEIKEYYELKKEIEEYXXKGEELHEEWXQXKNRVEXRDIL
EYXEELXGQIINYNXLXNKVLLYFQLGLHYLLLDILGRLVGYTGIWERD
AXLYQIAAMYXNGLPEYIXXKKNDKYKDGQIVGXKINXFKXDKKXLYN
AGLELFENXNEHKNIXIRNYIAHFNYLSKAESSLLXYSENLRXLFSYDR
KLKNAVXKSLINILLRHGMVLKFKFGTDKKSVXIRSXKKIXHLKSIAKK
LYYPEVXVSKEYCKLVKXLLKYK

[0378] HEPN sequence motifs identified from the above orthologs are provided in FIGS. 49 and 50 on the basis of the first 21 orthologs and all 33 orthologs respectively. Non-limiting examples of amino acid residues that can be mutated to generate catalytically dead C2c2 mutants, based on the above consensus include, in or near HEPN1, D372, R377, Q/H382, and F383 or corresponding amino acids of an ortholog, and in or near HEPN2, K893, N894, R898, N899, H903, F904, Y906, Y927, D928, K930, K932 or corresponding amino acids of an ortholog.

[0379] In another non-limiting example, a sequence alignment tool to assist generation of a consensus sequence and identification of conserved residues is the MUSCLE alignment tool (www.ebi.ac.uk/Tools/msa/muscle/). For example, using MUSCLE, the following amino acid locations conserved among C2c2 orthologs can be identified in Leptotrichia wadei C2c2:K2; K5; V6; E301; L331; I335; N341; G351; K352; E375; L392; L396; D403; F446; I466; I470; R474 (HEPN); H475; H479 (HEPN), E508; P556; L561; I595; Y596; F600; Y669; I673; F681; L685; Y761; L676; L779; Y782; L836; D847; Y863; L869; I872; K879; I933; L954; I958; R961; Y965; E970; R971; D972; R1046 (HEPN), H1051 (HEPN), Y1075; D1076; K1078; K1080; I1083; I1090.

[0380] Cas13c HEPN may also target DNA, or potentially DNA and/or RNA. On the basis that that the HEPN domains of Cas13c are at least capable of binding to and, in their wild-type form, cutting RNA, then it is preferred that the Cas13c effector protein has RNase function. It may also, or alternatively, have DNase function.

[0381] Thus, in some embodiments, the effector protein may be a RNA-binding protein, such as a dead-Cas type effector protein, which may be optionally functionalized as described herein for instance with an transcriptional activator or repressor domain, NLS or other functional domain. In some embodiments, the effector protein may be a RNA-binding protein that cleaves a single strand of RNA. If the RNA bound is ssRNA, then the ssRNA is fully cleaved. In some embodiments, the effector protein may be a RNA-binding protein that cleaves a double strand of RNA, for example if it comprises two RNase domains. If the RNA bound is dsRNA, then the dsRNA is fully cleaved.

[0382] RNase function in CRISPR systems is known, for example mRNA targeting has been reported for certain type III CRISPR-Cas systems (Hale et al., 2014, Genes Dev, vol. 28, 2432-2443; Hale et al., 2009, Cell, vol. 139, 945-956; Peng et al., 2015, Nucleic acids research, vol. 43, 406-417) and provides significant advantages. In the Staphylococcus epidermis type III-A system, transcription across targets results in cleavage of the target DNA and its transcripts, mediated by independent active sites within the Cas10-Csm ribonucleoprotein effector complex (see, Samai et al., 2015, Cell, vol. 151, 1164-1174). A CRISPR-Cas system, composition or method targeting RNA via the present effector proteins is thus provided.

[0383] The target RNA, i.e. the RNA of interest, is the RNA to be targeted by the present invention leading to the recruitment to, and the binding of the effector protein at, the target site of interest on the target RNA. The target RNA may be any suitable form of RNA. This may include, in some embodiments, mRNA. In other embodiments, the target RNA may include tRNA or rRNA. In other embodiments, the target RNA may include miRNA. In other embodiments, the target RNA may include siRNA.

### Cas13 Mutations

[0384] In certain embodiments, the effecteor protein (CRISPR enzyme; Cas13; effector protein) according to the invention as described herein is a catalytically inactive or dead Cas13 effector protein (dCas13). In some embodiments, the dCas13 effector comprises mutations in the nuclease domain. In some embodiments, the dCas13 effector protein has been truncated. To reduce the size of a fusion protein of the Cas13 effector and the one or more functional domains, the C-terminus of the Cas13 effector can be truncated while still maintaining its RNA binding function. For example, at least 20 amino acids, at least 50 amino acids, at least 80 amino acids, or at least 100 amino acids, or at least 150 amino acids, or at least 200 amino acids, or at least 250 amino acids, or at least 300 amino acids, or at least 350 amino acids, or up to 120 amino acids, or up to 140 amino acids, or up to 160 amino acids, or up to 180 amino acids, or up to 200 amino acids, or up to 250 amino acids, or up to 300 amino acids, or up to 350 amino acids, or up to 400 amino acids, may be truncated at the C-terminus of the Cas13b effector. Specific examples of Cas13 truncations include C-terminal 4984-1090, C-terminal 41026-1090, and C-terminal 41053-1090, C-terminal A934-1090, C-terminal A884-1090, C-terminal A834-1090, C-terminal A784-1090, and C-terminal A734-1090, wherein amino acid positions correspond to amino acid positions of Prevotella sp. P5-125 Cas13b protein. See FIG. 4.

Interfering RNA (RNAi) and microRNA (miRNA)

[0385] In other embodiments, the target RNA may include interfering RNA, i.e. RNA involved in an RNA interference pathway, such as shRNA, siRNA and so forth, both in eukaryotes and prokaryotes. In other embodiments, the target RNA may include microRNA (miRNA). Control over interfering RNA or miRNA may help reduce off-target effects (OTE) seen with those approaches by reducing the longevity of the interfering RNA or miRNA in vivo or in vitro.

[0386] In certain embodiments, the target is not the miRNA itself, but the miRNA binding site of a miRNA target.

[0387] In certain embodiments, miRNAs may be sequestered (such as including subcellularly relocated). In certain embodiments, miRNAs may be cut, such as without limitation at hairpins.

[0388] In certain embodiments, miRNA processing (such as including turnover) is increased or decreased.

[0389] If the effector protein and suitable guide are selectively expressed (for example spatially or temporally under the control of a suitable promoter, for example a tissue- or cell cycle-specific promoter and/or enhancer) then this could be used to ‘protect’ the cells or systems (in vivo or in vitro) from RNAi in those cells. This may be useful in neighbouring tissues or cells where RNAi is not required or for the purposes of comparison of the cells or tissues where the effector protein and suitable guide are and are not expressed (i.e. where the RNAi is not controlled and where it is, respectively). The effector protein may be used to control or bind to molecules comprising or consisting of RNA, such as ribozymes, ribosomes or riboswitches. In embodiments of the invention, the RNA guide can recruit the effector protein to these molecules so that the effector protein is able to bind to them.

[0390] The protein system of the invention can be applied in areas of RNAi technologies, without undue experimentation, from this disclosure, including therapeutic, assay and other applications (see, e.g., Guidi et al., PLoS Negl Trop Dis 9(5): e0003801. doi:10.1371/journal.pntd; Crotty et al., In vivo RNAi screens: concepts and applications. Shane Crotty . . . 2015 Elsevier Ltd. Published by Elsevier Inc., Pesticide Biochemistry and Physiology (Impact Factor: 2.01). 01/2015; 120. DOI: 10.1016/j.pestbp.2015.01.002 and Makkonen et al., Viruses 2015, 7(4), 2099-2125; doi:10.3390/v7042099), because the present application provides the foundation for informed engineering of the system.

Ribosomal RNA (rRNA)

[0391] For example, azalide antibiotics such as azithromycin, are well known. They target and disrupt the 50S ribosomal subunit. The present effector protein, together with a suitable guide RNA to target the 50S ribosomal subunit, may be, in some embodiments, recruited to and bind to the 50S ribosomal subunit. Thus, the present effector protein in concert with a suitable guide directed at a ribosomal (especially the 50s ribosomal subunit) target is provided. Use of this use effector protein in concert with the suitable guide directed at the ribosomal (especially the 50s ribosomal subunit) target may include antibiotic use. In particular, the antibiotic use is analogous to the action of azalide antibiotics, such as azithromycin. In some embodiments, prokaryotic ribosomal subunits, such as the 70S subunit in prokaryotes, the 50S subunit mentioned above, the 30S subunit, as well as the 16S and 5S subunits may be targeted. In other embodiments, eukaryotic ribosomal subunits, such as the 80S subunit in eukaryotes, the 60S subunit, the 40S subunit, as well as the 28S, 18S. 5.8S and 5S subunits may be targeted.

[0392] In some embodiments, the effector protein may be a RNA-binding protein, optionally functionalized, as described herein. In some embodiments, the effector protein may be a RNA-binding protein that cleaves a single strand of RNA. In either case, but particularly where the RNA-binding protein cleaves a single strand of RNA, then ribosomal function may be modulated and, in particular, reduced or destroyed. This may apply to any ribosomal RNA and any ribosomal subunit and the sequences of rRNA are well known.

[0393] Control of ribosomal activity is thus envisaged through use of the present effector protein in concert with a suitable guide to the ribosomal target. This may be through cleavage of, or binding to, the ribosome. In particular, reduction of ribosomal activity is envisaged. This may be useful in assaying ribosomal function in vivo or in vitro, but also as a means of controlling therapies based on ribosomal activity, in vivo or in vitro. Furthermore, control (i.e. reduction) of protein synthesis in an in vivo or in vitro system is envisaged, such control including antibiotic and research and diagnostic use.

### Riboswitches

[0394] A riboswitch (also known as an aptozyme) is a regulatory segment of a messenger RNA molecule that binds a small molecule. This typically results in a change in production of the proteins encoded by the mRNA. Thus, control of riboswitch activity is thus envisaged through use of the present effector protein in concert with a suitable guide to the riboswitch target. This may be through cleavage of, or binding to, the riboswitch. In particular, reduction of riboswitch activity is envisaged. This may be useful in assaying riboswitch function in vivo or in vitro, but also as a means of controlling therapies based on riboswitch activity, in vivo or in vitro. Furthermore, control (i.e. reduction) of protein synthesis in an in vivo or in vitro system is envisaged. This control, as for rRNA may include antibiotic and research and diagnostic use.

### Ribozymes

[0395] Ribozymes are RNA molecules having catalytic properties, analogous to enzymes (which are of course proteins). As ribozymes, both naturally occurring and engineered, comprise or consist of RNA, they may also be targeted by the present RNA-binding effector protein. In some embodiments, the effector protein may be a RNA-binding protein cleaves the ribozyme to thereby disable it. Control of ribozymal activity is thus envisaged through use of the present effector protein in concert with a suitable guide to the ribozymal target. This may be through cleavage of, or binding to, the ribozyme. In particular, reduction of ribozymal activity is envisaged. This may be useful in assaying ribozymal function in vivo or in vitro, but also as a means of controlling therapies based on ribozymal activity, in vivo or in vitro.

### Gene Expression, Including RNA Processing

[0396] The effector protein may also be used, together with a suitable guide, to target gene expression, including via control of RNA processing. The control of RNA processing may include RNA processing reactions such as RNA splicing, including alternative splicing, via targeting of RNApol; viral replication (in particular of satellite viruses, bacteriophages and retroviruses, such as HBV, HBC and HIV and others listed herein) including virioids in plants; and tRNA biosynthesis. The effector protein and suitable guide may also be used to control RNAactivation (RNAa). RNAa leads to the promotion of gene expression, so control of gene expression may be achieved that way through disruption or reduction of RNAa and thus less promotion of gene expression. This is discussed more in detail below.

### RNAi Screens

[0397] Identifying gene products whose knockdown is associated with phenotypic changes, biological pathways can be interrogated and the constituent parts identified, via RNAi screens. Control may also be exerted over or during these screens by use of the effector protein and suitable guide to remove or reduce the activity of the RNAi in the screen and thus reinstate the activity of the (previously interfered with) gene product (by removing or reducing the interference/repression).

[0398] Satellite RNAs (satRNAs) and satellite viruses may also be treated.

[0399] Control herein with reference to RNase activity generally means reduction, negative disruption or known-down or knock out.

### In Vivo RNA Applications

### Inhibition of Gene Expression

[0400] The target-specific RNAses provided herein allow for very specific cutting of a target RNA. The interference at RNA level allows for modulation both spatially and temporally and in a non-invasive way, as the genome is not modified.

[0401] A number of diseases have been demonstrated to be treatable by mRNA targeting.

[0402] While most of these studies relate to administration of siRNA, it is clear that the RNA targeting effector proteins provided herein can be applied in a similar way.

[0403] Examples of mRNA targets (and corresponding disease treatments) are VEGF, VEGF-R1 and RTP801 (in the treatment of AMD and/or DME), Caspase 2 (in the treatment of Naion)ADRB2 (in the treatment of intraocular pressure), TRPVI (in the treatment of Dry eye syndrome, Syk kinase (in the treatment of asthma), Apo B (in the treatment of hypercholesterolemia or hypobetalipoproteinemia), PLK1, KSP and VEGF (in the treatment of solid tumors), Ber-Abl (in the treatment of CML)(Burnett and Rossi Chem Biol. 2012, 19(1): 60-71)). Similarly, RNA targeting has been demonstrated to be effective in the treatment of RNA-virus mediated diseases such as HIV (targeting of HIV Tet and Rev), RSV (targeting of RSV nucleocapsid) and HCV (targeting of miR-122) (Burnett and Rossi Chem Biol. 2012, 19(1): 60-71).

[0404] It is further envisaged that the RNA targeting effector protein of the invention can be used for mutation specific or allele specific knockdown. Guide RNA's can be designed that specifically target a sequence in the transcribed mRNA comprising a mutation or an allele-specific sequence. Such specific knockdown is particularly suitable for therapeutic applications relating to disorders associated with mutated or allele-specific gene products. For example, most cases of familial hypobetalipoproteinemia (FHBL) are caused by mutations in the ApoB gene. This gene encodes two versions of the apolipoprotein B protein: a short version (ApoB-48) and a longer version (ApoB-100). Several ApoB gene mutations that lead to FHBL cause both versions of ApoB to be abnormally short. Specifically targeting and knockdown of mutated ApoB mRNA transcripts with an RNA targeting effector protein of the invention may be beneficial in treatment of FHBL. As another example, Huntington's disease (HD) is caused by an expansion of CAG triplet repeats in the gene coding for the Huntingtin protein, which results in an abnormal protein. Specifically targeting and knockdown of mutated or allele-specific mRNA transcripts encoding the Huntingtin protein with an RNA targeting effector protein of the invention may be beneficial in treatment of HD.

[0405] It is noted that in this context, and more generally for the various applications as described herein, the use of a split version of the RNA targeting effector protein can be envisaged. Indeed, this may not only allow increased specificity but may also be advantageous for delivery. The Cas13c is split in the sense that the two parts of the Cas13c enzyme substantially comprise a functioning Cas13c. Ideally, the split should always be so that the catalytic domain(s) are unaffected. That Cas13c may function as a nuclease or it may be a dead-Cas13c which is essentially an RNA-binding protein with very little or no catalytic activity, due to typically mutation(s) in its catalytic domains.

[0406] Each half of the split Cas13c may be fused to a dimerization partner. By means of example, and without limitation, employing rapamycin sensitive dimerization domains, allows to generate a chemically inducible split Cas13c for temporal control of Cas13c activity. Cas13c can thus be rendered chemically inducible by being split into two fragments and that rapamycin-sensitive dimerization domains may be used for controlled reassembly of the Cas13c. The two parts of the split Cas13c can be thought of as the N′ terminal part and the C′ terminal part of the split Cas13c. The fusion is typically at the split point of the Cas13c. In other words, the C′ terminal of the N′ terminal part of the split Cas13c is fused to one of the dimer halves, whilst the N′ terminal of the C′ terminal part is fused to the other dimer half.

[0407] The Cas13c does not have to be split in the sense that the break is newly created. The split point is typically designed in silico and cloned into the constructs. Together, the two parts of the split Cas13c, the N′ terminal and C′ terminal parts, form a full Cas13c, comprising preferably at least 70% or more of the wildtype amino acids (or nucleotides encoding them), preferably at least 80% or more, preferably at least 90% or more, preferably at least 95% or more, and most preferably at least 99% or more of the wildtype amino acids (or nucleotides encoding them). Some trimming may be possible, and mutants are envisaged. Non-functional domains may be removed entirely. What is important is that the two parts may be brought together and that the desired Cas13c function is restored or reconstituted. The dimer may be a homodimer or a heterodimer.

[0408] In certain embodiments, the Cas13c effector as described herein may be used for mutation-specific, or allele-specific targeting, such as for mutation-specific, or allele-specific knockdown.

[0409] The RNA targeting effector protein can moreover be fused to another functional RNAse domain, such as a non-specific RNase or Argonaute 2, which acts in synergy to increase the RNAse activity or to ensure further degradation of the message.

[0410] Modulation of Gene Expression Through Modulation of RNA Function

[0411] Apart from a direct effect on gene expression through cleavage of the mRNA, RNA targeting can also be used to impact specific aspects of the RNA processing within the cell, which may allow a more subtle modulation of gene expression. Generally, modulation can for instance be mediated by interfering with binding of proteins to the RNA, such as for instance blocking binding of proteins, or recruiting RNA binding proteins. Indeed, modulations can be ensured at different levels such as splicing, transport, localization, translation and turnover of the mRNA. Similarly in the context of therapy, it can be envisaged to address (pathogenic) malfunctioning at each of these levels by using RNA-specific targeting molecules. In these embodiments it is in many cases preferred that the RNA targeting protein is a “dead” Cas13c that has lost the ability to cut the RNA target but maintains its ability to bind thereto, such as the mutated forms of Cas13c described herein.

[0412] A) Alternative Splicing

[0413] Many of the human genes express multiple mRNAs as a result of alternative splicing. Different diseases have been shown to be linked to aberrant splicing leading to loss of function or gain of function of the expressed gene. While some of these diseases are caused by mutations that cause splicing defects, a number of these are not. One therapeutic option is to target the splicing mechanism directly. The RNA targeting effector proteins described herein can for instance be used to block or promote slicing, include or exclude exons and influence the expression of specific isoforms and/or stimulate the expression of alternative protein products. Such applications are described in more detail below.

[0414] A RNA targeting effector protein binding to a target RNA can sterically block access of splicing factors to the RNA sequence. The RNA targeting effector protein targeted to a splice site may block splicing at the site, optionally redirecting splicing to an adjacent site. For instance a RNA targeting effector protein binding to the 5′ splice site binding can block the recruitment of the U1 component of the spliceosome, favoring the skipping of that exon. Alternatively, a RNA targeting effector protein targeted to a splicing enhancer or silencer can prevent binding of transacting regulatory splicing factors at the target site and effectively block or promote splicing. Exon exclusion can further be achieved by recruitment of ILF2/3 to precursor mRNA near an exon by an RNA targeting effector protein as described herein. As yet another example, a glycine rich domain can be attached for recruitment of hnRNP A1 and exon exclusion (Del Gatto-Konczak et al. Mol Cell Biol. 1999 January; 19(1):251-60).

[0415] In certain embodiments, through appropriate selection of gRNA, specific splice variants may be targeted, while other splice variants will not be targeted.

[0416] In some cases the RNA targeting effector protein can be used to promote slicing (e.g. where splicing is defective). For instance a RNA targeting effector protein can be associated with an effector capable of stabilizing a splicing regulatory stem-loop in order to further splicing. The RNA targeting effector protein can be linked to a consensus binding site sequence for a specific splicing factor in order to recruit the protein to the target DNA.

[0417] Examples of diseases which have been associated with aberrant splicing include, but are not limited to Paraneoplastic Opsoclonus Myoclonus Ataxia (or POMA), resulting from a loss of Nova proteins which regulate splicing of proteins that function in the synapse, and Cystic Fibrosis, which is caused by defective splicing of a cystic fibrosis transmembrane conductance regulator, resulting in the production of nonfunctional chloride channels. In other diseases aberrant RNA splicing results in gain-of-function. This is the case for instance in myotonic dystrophy which is caused by a CUG triplet-repeat expansion (from 50 to >1500 repeats) in the 3′UTR of an mRNA, causing splicing defects.

[0418] The RNA targeting effector protein can be used to include an exon by recruiting a splicing factor (such as U1) to a 5′ splicing site to promote excision of introns around a desired exon. Such recruitment could be mediated trough a fusion with an arginine/serine rich domain, which functions as splicing activator (Gravely BR and Maniatis T, Mol Cell. 1998 (5):765-71).

[0419] It is envisaged that the RNA targeting effector protein can be used to block the splicing machinery at a desired locus, resulting in preventing exon recognition and the expression of a different protein product. An example of a disorder that may treated is Duchenne muscular dystrophy (DMD), which is caused by mutations in the gene encoding for the dystrophin protein. Almost all DMD mutations lead to frameshifts, resulting in impaired dystrophin translation. The RNA targeting effector protein can be paired with splice junctions or exonic splicing enhancers (ESEs) thereby preventing exon recognition, resulting in the translation of a partially functional protein. This converts the lethal Duchenne phenotype into the less severe Becker phenotype.

[0420] B) RNA Modification

[0421] RNA editing is a natural process whereby the diversity of gene products of a given sequence is increased by minor modification in the RNA. Typically, the modification involves the conversion of adenosine (A) to inosine (I), resulting in an RNA sequence which is different from that encoded by the genome. RNA modification is generally ensured by the ADAR enzyme, whereby the pre-RNA target forms an imperfect duplex RNA by base-pairing between the exon that contains the adenosine to be edited and an intronic non-coding element. A classic example of A-I editing is the glutamate receptor GluR-B mRNA, whereby the change results in modified conductance properties of the channel (Higuchi M, et al. Cell. 1993; 75:1361-70).

[0422] According to the invention, enzymatic approaches are used to induce transitions (A<→G or C<→U changes) or transversions (any puring to any pyrimidine of vice versa) in the RNA bases of a given transcript. Transitions can be directly induced by using adening (ADAR1/2), APOBEC) or cytosine deaminases (AID) which convert A to I or C to U, respectively. Transversions can be indirectly induced by localizing reactive oxygen species damage to the bases of interest, which causes chemical modifications to be added to the affected bases, such as the conversion of guanine to oxo-guanine. An oxo-gaunine is recognized as a T and will thus base pair with an adenine causing translation to be affected. Proteins that can be recruited for ROS-mediated base damage include APEX and mini-SOG. With both approaches, these effectors can be fused to a catalytically inactive Cas13c and be recruited to sites on transcripts where these types of mutations are desired.

[0423] In humans, a heterozygous functional-null mutation in the ADAR1 gene leads to a skin disease, human pigmentary genodermatosis (Miyamura Y, et al. Am J Hum Genet. 2003; 73:693-9). It is envisaged that the RNA targeting effector proteins of the present invention can be used to correct malfunctioning RNA modification.

[0424] It is further envisaged that RNA adenosine methylase (N(6)-methyladenosine) can be fused to the RNA targeting effector proteins of the invention and targeted to a transcript of interest. This methylase causes reversible methylation, has regulatory roles and may affect gene expression and cell fate decisions by modulating multiple RNA-related cellular pathways (Fu et al Nat Rev Genet. 2014; 15(5):293-306).

[0425] C) Polyadenylation

[0426] Polyadenylation of an mRNA is important for nuclear transport, translation efficiency and stability of the mRNA, and all of these, as well as the process of polyadenylation, depend on specific RBPs. Most eukaryotic mRNAs receive a 3′ poly(A) tail of about 200 nucleotides after transcription. Polyadenylation involves different RNA-binding protein complexes which stimulate the activity of a poly(A)polymerase (Minvielle-Sebastia L et al. Curr Opin Cell Biol. 1999; 11:352-7). It is envisaged that the RNA-targeting effector proteins provided herein can be used to interfere with or promote the interaction between the RNA-binding proteins and RNA.

[0427] Examples of diseases which have been linked to defective proteins involved in polyadenylation are oculopharyngeal muscular dystrophy (OPMD) (Brais B, et al. Nat Genet. 1998; 18:164-7).

### D) RNA Export

[0428] After pre-mRNA processing, the mRNA is exported from the nucleus to the cytoplasm.

[0429] This is ensured by a cellular mechanism which involves the generation of a carrier complex, which is then translocated through the nuclear pore and releases the mRNA in the cytoplasm, with subsequent recycling of the carrier.

[0430] Overexpression of proteins (such as TAP) which play a role in the export of RNA has been found to increase export of transcripts that are otherwise ineffeciently exported in Xenopus (Katahira J, et al. EMBO J. 1999; 18:2593-609).

[0431] E) mRNA Localization

[0432] mRNA localization ensures spatially regulated protein production. Localization of transcripts to a specific region of the cell can be ensured by localization elements. In particular embodiments, it is envisaged that the effector proteins described herein can be used to target localization elements to the RNA of interest. The effector proteins can be designed to bind the target transcript and shuttle them to a location in the cell determined by its peptide signal tag. More particularly for instance, a RNA targeting effector protein fused to one or more nuclear localization signal (NLS) and/or one or more nuclear export signal (NES) can be used to alter RNA localization.

[0433] Further examples of localization signals include the zipcode binding protein (ZBP1) which ensures localization of β-actin to the cytoplasm in several asymmetric cell types, KDEL retention sequence (localization to endoplasmic reticulum), nuclear export signal (localization to cytoplasm), mitochondrial targeting signal (localization to mitochondria), peroxisomal targeting signal (localization to peroxisome) and m6A marking/YTHDF2 (localization to p-bodies). Other approaches that are envisaged are fusion of the RNA targeting effector protein with proteins of known localization (for instance membrane, synapse).

[0434] Alternatively, the effector protein according to the invention may for instance be used in localization-dependent knockdown. By fusing the effector protein to a appropriate localization signal, the effector is targeted to a particular cellular compartment. Only target RNAs residing in this compartment will effectively be targeted, whereas otherwise identical targets, but residing in a different cellular compartment will not be targeted, such that a localization dependent knockdown can be established.

[0435] F) Translation

[0436] The RNA targeting effector proteins described herein can be used to enhance or repress translation. It is envisaged that upregulating translation is a very robust way to control cellular circuits. Further, for functional studies a protein translation screen can be favorable over transcriptional upregulation screens, which have the shortcoming that upregulation of transcript does not translate into increased protein production.

[0437] It is envisaged that the RNA targeting effector proteins described herein can be used to bring translation initiation factors, such as EIF4G in the vicinity of the 5′ untranslated repeat (5′UTR) of a messenger RNA of interest to drive translation (as described in De Gregorio et al. EMBO J. 1999; 18(17):4865-74 for a non-reprogrammable RNA binding protein). As another example GLD2, a cytoplasmic poly(A) polymerase, can be recruited to the target mRNA by an RNA targeting effector protein. This would allow for directed polyadenylation of the target mRNA thereby stimulating translation.

[0438] Similarly, the RNA targeting effector proteins envisaged herein can be used to block translational repressors of mRNA, such as ZBP1 (Huttelmaier S, et al. Nature. 2005; 438:512-5). By binding to translation initiation site of a target RNA, translation can be directly affected.

[0439] In addition, fusing the RNA targeting effector proteins to a protein that stabilizes mRNAs, e.g. by preventing degradation thereof such as RNase inhibitors, it is possible to increase protein production from the transcripts of interest.

[0440] It is envisaged that the RNA targeting effector proteins described herein can be used to repress translation by binding in the 5UTR regions of a RNA transcript and preventing the ribosome from forming and beginning translation.

[0441] Further, the RNA targeting effector protein can be used to recruit Caf1, a component of the CCR4-NOT deadenylase complex, to the target mRNA, resulting in deadenylation or the target transcript and inhibition of protein translation.

[0442] For instance, the RNA targeting effector protein of the invention can be used to increase or decrease translation of therapeutically relevant proteins. Examples of therapeutic applications wherein the RNA targeting effector protein can be used to downregulate or upregulate translation are in amyotrophic lateral sclerosis (ALS) and cardiovascular disorders. Reduced levels of the glial glutamate transporter EAAT2 have been reported in ALS motor cortex and spinal cord, as well as multiple abnormal EAAT2 mRNA transcripts in ALS brain tissue. Loss of the EAAT2 protein and function thought to be the main cause of excitotoxicity in ALS. Restoration of EAAT2 protein levels and function may provide therapeutic benefit. Hence, the RNA targeting effector protein can be beneficially used to upregulate the expression of EAAT2 protein, e.g. by blocking translational repressors or stabilizing mRNA as described above. Apolipoprotein A1 is the major protein component of high density lipoprotein (HDL) and ApoAl and HDL are generally considered as atheroprotective. It is envisages that the RNA targeting effector protein can be beneficially used to upregulate the expression of ApoAl, e.g. by blocking translational repressors or stabilizing mRNA as described above.

[0443] G) mRNA Turnover

[0444] Translation is tightly coupled to mRNA turnover and regulated mRNA stability. Specific proteins have been described to be involved in the stability of transcripts (such as the ELAV/Hu proteins in neurons, Keene J D, 1999, Proc Natl Acad Sci USA. 96:5-7) and tristetraprolin (TTP). These proteins stabilize target mRNAs by protecting the messages from degradation in the cytoplasm (Peng S S et al., 1988, EMBO J. 17:3461-70).

[0445] It can be envisaged that the RNA-targeting effector proteins of the present invention can be used to interfere with or to promote the activity of proteins acting to stabilize mRNA transcripts, such that mRNA turnover is affected. For instance, recruitment of human TTP to the target RNA using the RNA targeting effector protein would allow for adenylate-uridylate-rich element (AU-rich element) mediated translational repression and target degradation. AU-rich elements are found in the 3′ UTR of many mRNAs that code for proto-oncogenes, nuclear transcription factors, and cytokines and promote RNA stability. As another example, the RNA targeting effector protein can be fused to HuR, another mRNA stabilization protein (Hinman M N and Lou H, Cell Mol Life Sci 2008; 65:3168-81), and recruit it to a target transcript to prolong its lifetime or stabilize short-lived mRNA.

[0446] It is further envisaged that the RNA-targeting effector proteins described herein can be used to promote degradation of target transcripts. For instance, m6A methyltransferase can be recruited to the target transcript to localize the transcript to P-bodies leading to degradation of the target.

[0447] As yet another example, an RNA targeting effector protein as described herein can be fused to the non-specific endonuclease domain PilT N-terminus (PIN), to recruit it to a target transcript and allow degradation thereof.

[0448] Patients with paraneoplastic neurological disorder (PND)-associated encephalomyelitis and neuropathy are patients who develop autoantibodies against Hu-proteins in tumors outside of the central nervous system (Szabo A et al. 1991, Cell; 67:325-33 which then cross the blood-brain barrier. It can be envisaged that the RNA-targeting effector proteins of the present invention can be used to interfere with the binding of auto-antibodies to mRNA transcripts.

[0449] Patients with dystrophy type 1 (DM1), caused by the expansion of (CUG)n in the 3′ UTR of dystrophia myotonica-protein kinase (DMPK) gene, are characterized by the accumulation of such transcripts in the nucleus. It is envisaged that the RNA targeting effector proteins of the invention fused with an endonuclease targeted to the (CUG)n repeats could inhibit such accumulation of aberrant transcripts.

[0450] H) Interaction with Multi-Functional Proteins

[0451] Some RNA-binding proteins bind to multiple sites on numerous RNAs to function in diverse processes. For instance, the hnRNP A1 protein has been found to bind exonic splicing silencer sequences, antagonizing the splicing factors, associate with telomere ends (thereby stimulating telomere activity) and bind miRNA to facilitate Drosha-mediated processing thereby affecting maturation. It is envisaged that the RNA-binding effector proteins of the present invention can interfere with the binding of RNA-binding proteins at one or more locations.

[0452] I) RNA Folding

[0453] RNA adopts a defined structure in order to perform its biological activities. Transitions in conformation among alternative tertiary structures are critical to most RNA-mediated processes. However, RNA folding can be associated with several problems. For instance, RNA may have a tendency to fold into, and be upheld in, improper alternative conformations and/or the correct tertiary structure may not be sufficiently thermodynamically favored over alternative structures. The RNA targeting effector protein, in particular a cleavage-deficient or dead RNA targeting protein, of the invention may be used to direct folding of (m)RNA and/or capture the correct tertiary structure thereof.

### Use of RNA-Targeting Effector Protein in Modulating Cellular Status

[0454] In certain embodiments Cas13c in a complex with crRNA is activated upon binding to target RNA and subsequently cleaves any nearby ssRNA targets (i.e. “collateral” or “bystander” effects). Cas13c, once primed by the cognate target, can cleave other (non-complementary) RNA molecules. Such promiscuous RNA cleavage could potentially cause cellular toxicity, or otherwise affect cellular physiology or cell status.

[0455] Accordingly, in certain embodiments, the non-naturally occurring or engineered composition, vector system, or delivery systems as described herein are used for or are for use in induction of cell dormancy. In certain embodiments, the non-naturally occurring or engineered composition, vector system, or delivery systems as described herein are used for or are for use in induction of cell cycle arrest. In certain embodiments, the non-naturally occurring or engineered composition, vector system, or delivery systems as described herein are used for or are for use in reduction of cell growth and/or cell proliferation. In certain embodiments, the non-naturally occurring or engineered composition, vector system, or delivery systems as described herein are used for or are for use in induction of cell anergy. In certain embodiments, the non-naturally occurring or engineered composition, vector system, or delivery systems as described herein are used for or are for use in induction of cell apoptosis. In certain embodiments, the non-naturally occurring or engineered composition, vector system, or delivery systems as described herein are used for or are for use in incuction of cell necrosis. In certain embodiments, the non-naturally occurring or engineered composition, vector system, or delivery systems as described herein are used for or are for use in induction of cell death. In certain embodiments, the non-naturally occurring or engineered composition, vector system, or delivery systems as described herein are used for or are for use in induction of programmed cell death.

[0456] In certain embodiments, the invention relates to a method for induction of cell dormancy comprising introducing or inducing the non-naturally occurring or engineered composition, vector system, or delivery systems as described herein. In certain embodiments, the invention relates to a method for induction of cell cycle arrest comprising introducing or inducing the non-naturally occurring or engineered composition, vector system, or delivery systems as described herein. In certain embodiments, the invention relates to a method for reduction of cell growth and/or cell proliferation comprising introducing or inducing the non-naturally occurring or engineered composition, vector system, or delivery systems as described herein. In certain embodiments, the invention relates to a method for induction of cell anergy comprising introducing or inducing the non-naturally occurring or engineered composition, vector system, or delivery systems as described herein. In certain embodiments, the invention relates to a method for induction of cell apoptosis comprising introducing or inducing the non-naturally occurring or engineered composition, vector system, or delivery systems as described herein. In certain embodiments, the invention relates to a method for induction of cell necrosis comprising introducing or inducing the non-naturally occurring or engineered composition, vector system, or delivery systems as described herein. In certain embodiments, the invention relates to a method for induction of cell death comprising introducing or inducing the non-naturally occurring or engineered composition, vector system, or delivery systems as described herein. In certain embodiments, the invention relates to a method for induction of programmed cell death comprising introducing or inducing the non-naturally occurring or engineered composition, vector system, or delivery systems as described herein.

[0457] The methods and uses as described herein may be therapeutic or prophylactic and may target particular cells, cell (sub)populations, or cell/tissue types. In particular, the methods and uses as described herein may be therapeutic or prophylactic and may target particular cells, cell (sub)populations, or cell/tissue types expressing one or more target sequences, such as one or more particular target RNA (e.g. ss RNA). Without limitation, target cells may for instance be cancer cells expressing a particular transcript, e.g. neurons of a given class, (immune) cells causing e.g. autoimmunity, or cells infected by a specific (e.g. viral) pathogen, etc.

[0458] Accordingly, in certain embodiments, the invention relates to a method for treating a pathological condition characterized by the presence of undesirable cells (host cells), comprising introducing or inducing the non-naturally occurring or engineered composition, vector system, or delivery systems as described herein. In certain embodiments, the invention relates the use of the non-naturally occurring or engineered composition, vector system, or delivery systems as described herein for treating a pathological condition characterized by the presence of undesirable cells (host cells). In certain embodiments, the invention relates the non-naturally occurring or engineered composition, vector system, or delivery systems as described herein for use in treating a pathological condition characterized by the presence of undesirable cells (host cells). It is to be understood that preferably the CRISPR-Cas system targets a target specific for the undesirable cells. In certain embodiments, the invention relates to the use of the non-naturally occurring or engineered composition, vector system, or delivery systems as described herein for treating, preventing, or alleviating cancer. In certain embodiments, the invention relates to the non-naturally occurring or engineered composition, vector system, or delivery systems as described herein for use in treating, preventing, or alleviating cancer. In certain embodiments, the invention relates to a method for treating, preventing, or alleviating cancer comprising introducing or inducing the non-naturally occurring or engineered composition, vector system, or delivery systems as described herein. It is to be understood that preferably the CRISPR-Cas system targets a target specific for the cancer cells. In certain embodiments, the invention relates to the use of the non-naturally occurring or engineered composition, vector system, or delivery systems as described herein for treating, preventing, or alleviating infection of cells by a pathogen. In certain embodiments, the invention relates to the non-naturally occurring or engineered composition, vector system, or delivery systems as described herein for use in treating, preventing, or alleviating infection of cells by a pathogen. In certain embodiments, the invention relates to a method for treating, preventing, or alleviating infection of cells by a pathogen comprising introducing or inducing the non-naturally occurring or engineered composition, vector system, or delivery systems as described herein. It is to be understood that preferably the CRISPR-Cas system targets a target specific for the cells infected by the pathogen (e.g. a pathogen derived target). In certain embodiments, the invention relates to the use of the non-naturally occurring or engineered composition, vector system, or delivery systems as described herein for treating, preventing, or alleviating an autoimmune disorder. In certain embodiments, the invention relates to the non-naturally occurring or engineered composition, vector system, or delivery systems as described herein for use in treating, preventing, or alleviating an autoimmune disorder. In certain embodiments, the invention relates to a method for treating, preventing, or alleviating an autoimmune disorder comprising introducing or inducing the non-naturally occurring or engineered composition, vector system, or delivery systems as described herein. It is to be understood that preferably the CRISPR-Cas system targets a target specific for the cells responsible for the autoimmune disorder (e.g. specific immune cells).

### Use of RNA-Targeting Effector Protein in RNA Detection or Protein Detection

[0459] It is further envisaged that the RNA targeting effector protein can be used for detection of nucleic acids or proteins in a biological sample. The samples can be can be cellular or cell-free.

[0460] in Northern blot assays. Northern blotting involves the use of electrophoresis to separate RNA samples by size. The RNA targeting effector protein can be used to specifically bind and detect the target RNA sequence.

[0461] A RNA targeting effector protein can also be fused to a fluorescent protein (such as GFP) and used to track RNA localization in living cells. More particularly, the RNA targeting effector protein can be inactivated in that it no longer cleaves RNA. In particular embodiments, it is envisaged that a split RNA targeting effector protein can be used, whereby the signal is dependent on the binding of both subproteins, in order to ensure a more precise visualization. Alternatively, a split fluorescent protein can be used that is reconstituted when multiple RNA targeting effector protein complexes bind to the target transcript. It is further envisaged that a transcript is targeted at multiple binding sites along the mRNA so the fluorescent signal can amplify the true signal and allow for focal identification. As yet another alternative, the fluorescent protein can be reconstituted form a split intein.

[0462] RNA targeting effector proteins are for instance suitably used to determine the localization of the RNA or specific splice variants, the level of mRNA transcript, up- or down regulation of transcripts and disease-specific diagnosis. The RNA targeting effector proteins can be used for visualization of RNA in (living) cells using e.g. fluorescent microscopy or flow cytometry, such as fluorescence-activated cell sorting (FACS) which allows for high-throughput screening of cells and recovery of living cells following cell sorting. Further, expression levels of different transcripts can be assessed simultaneously under stress, e.g. inhibition of cancer growth using molecular inhibitors or hypoxic conditions on cells. Another application would be to track localization of transcripts to synaptic connections during a neural stimulus using two photon microscopy.

[0463] In certain embodiments, the components or complexes according to the invention as described herein can be used in multiplexed error-robust fluorescence in situ hybridization (MERFISH; Chen et al. Science; 2015; 348(6233)), such as for instance with (fluorescently) labeled Cas13c effectors.

### In Vitro Apex Labeling

[0464] Cellular processes depend on a network of molecular interactions among protein, RNA, and DNA. Accurate detection of protein—DNA and protein—RNA interactions is key to understanding such processes. In vitro proximity labeling technology employs an affinity tag combined with e.g. a photoactivatable probe to label polypeptides and RNAs in the vicinity of a protein or RNA of interest in vitro. After UV irradiation the photoactivatable group reacts with proteins and other molecules that are in close proximity to the tagged molecule, thereby labelling them. Labelled interacting molecules can subsequently be recovered and identified. The RNA targeting effector protein of the invention can for instance be used to target a probe to a selected RNA sequence.

[0465] These applications could also be applied in animal models for in vivo imaging of disease relevant applications or difficult-to culture cell types.

[0466] The invention provides agents and methods for diagnosing and monitoring health states through non-invasive sampling of cell free RNA, including testing for risk and guiding RNA-targeted therapies, and is useful in setting where rapid administration of therapy is important to treatment outcomes. In one embodiment, the invention provides cancer detection methods and agents for circulating tumor RNA, including for monitoring recurrence and/or development of common drug resistance mutations. In another embodiment, the invention provides detection methods and agents for detection and/or identification of bacterial species directly from blood or serum to monitor, e.g., disease progression and sepsis. In an embodiment of the invention, the Cas13c proteins and derivative are used to distinguish and diagnose common diseases such as rhinovirus or upper respiratory tract infections from more serious infections such as bronchitis.

[0467] The invention provides methods and agents for rapid genotyping for emergency pharmacogenomics, including guidance for administration of anticoagulants during myocardial infarction or stroke treatment based on, e.g., VKORC1, CYP2C9, and CYP2C19 genotyping.

[0468] The invention provides agents and methods for monitoring food contamination by bacteria at all points along a food production and delivery chain. In another embodiment, the invention provides for quality control and monitoring, e.g. by identification of food sources and determination of purity. In one non-limiting example, the invention may be used to identify or confirm a food sources, such as a species of animal meat and seafood.

[0469] In another embodiment, the invention is used in phorensic determinations. For example, crime scene samples containing blood or other bodily fluids. In an embodiment of the invention, the invention is used to identify nucleic acid samples from fingerprints.

### Use of RNA-Targeting Effector Protein in RNA Origami/In Vitro Assembly Lines—Combinatorics

[0470] RNA origami refers to nanoscale folded structures for creating two-dimensional or three-dimensional structures using RNA as integrated template. The folded structure is encoded in the RNA and the shape of the resulting RNA is thus determined by the synthesized RNA sequence (Geary, et al. 2014. Science, 345 (6198). pp. 799-804). The RNA origami may act as scaffold for arranging other components, such as proteins, into complexes. The RNA targeting effector protein of the invention can for instance be used to target proteins of interest to the RNA origami using a suitable guide RNA.

### Use of RNA-Targeting Effector Protein in RNA Isolation or Purification, Enrichment or Depletion

[0471] It is further envisages that the RNA targeting effector protein when complexed to RNA can be used to isolate and/or purify the RNA. The RNA targeting effector protein can for instance be fused to an affinity tag that can be used to isolate and/or purify the RNA-RNA targeting effector protein complex. Such applications are for instance useful in the analysis of gene expression profiles in cells. In particular embodiments, it can be envisaged that the RNA targeting effector proteins can be used to target a specific noncoding RNA (ncRNA) thereby blocking its activity, providing a useful functional probe. In certain embodiments, the effecetor protein as described herein may be used to specifically enrich for a particular RNA (including but not limited to increasing stability, etc.), or alternatively to specifically deplete a particular RNA (such as without limitation for instance particular splice variants, isoforms, etc.).

Interrogation of lincRNA Function and Other Nuclear RNAs

[0472] Current RNA knockdown strategies such as siRNA have the disadvantage that they are mostly limited to targeting cytosolic transcripts since the protein machinery is cytosolic. The advantage of a RNA targeting effector protein of the present invention, an exogenous system that is not essential to cell function, is that it can be used in any compartment in the cell. By fusing a NLS signal to the RNA targeting effector protein, it can be guided to the nucleus, allowing nuclear RNAs to be targeted. It is for instance envisaged to probe the function of lincRNAs. Long intergenic non-coding RNAs (lincRNAs) are a vastly underexplored area of research. Most lincRNAs have as of yet unknown functions which could be studies using the RNA targeting effector protein of the invention.

### Identification of RNA Binding Proteins

[0473] Identifying proteins bound to specific RNAs can be useful for understanding the roles of many RNAs. For instance, many lincRNAs associate with transcriptional and epigenetic regulators to control transcription. Understanding what proteins bind to a given lincRNA can help elucidate the components in a given regulatory pathway. A RNA targeting effector protein of the invention can be designed to recruit a biotin ligase to a specific transcript in order to label locally bound proteins with biotin. The proteins can then be pulled down and analyzed by mass spectrometry to identify them.

### Assembly of Complexes on RNA and Substrate Shuttling

[0474] RNA targeting effector proteins of the invention can further be used to assemble complexes on RNA. This can be achieved by functionalizing the RNA targeting effector protein with multiple related proteins (e.g. components of a particular synthesis pathway). Alternatively, multiple RNA targeting effector proteins can be functionalized with such different related proteins and targeted to the same or adjacent target RNA. Useful application of assembling complexes on RNA are for instance facilitating substrate shuttling between proteins.

### Synthetic Biology

[0475] The development of biological systems have a wide utility, including in clinical applications. It is envisaged that the programmable RNA targeting effector proteins of the invention can be used fused to split proteins of toxic domains for targeted cell death, for instance using cancer-linked RNA as target transcript. Further, pathways involving protein-protein interaction can be influenced in synthetic biological systems with e.g. fusion complexes with the appropriate effectors such as kinases or other enzymes.

### Protein Splicing: Inteins

[0476] Protein splicing is a post-translational process in which an intervening polypeptide, referred to as an intein, catalyzes its own excision from the polypeptides flacking it, referred to as exteins, as well as subsequent ligation of the exteins. The assembly of two or more RNA targeting effector proteins as described herein on a target transcript could be used to direct the release of a split intein (Topilina and Mills Mob DNA. 2014 Feb. 4; 5(1):5), thereby allowing for direct computation of the existence of a mRNA transcript and subsequent release of a protein product, such as a metabolic enzyme or a transcription factor (for downstream actuation of transcription pathways). This application may have significant relevance in synthetic biology (see above) or large-scale bioproduction (only produce product under certain conditions).

### Inducible, Dosed and Self-Inactivating Systems

[0477] In one embodiment, fusion complexes comprising an RNA targeting effector protein of the invention and an effector component are designed to be inducible, for instance light inducible or chemically inducible. Such inducibility allows for activation of the effector component at a desired moment in time.

[0478] Light inducibility is for instance achieved by designing a fusion complex wherein CRY2 PHR/CIBN pairing is used for fusion. This system is particularly useful for light induction of protein interactions in living cells (Konermann S, et al. Nature. 2013; 500:472-476).

[0479] Chemical inducibility is for instance provided for by designing a fusion complex wherein FKBP/FRB (FK506 binding protein/FKBP rapamycin binding) pairing is used for fusion. Using this system rapamycin is required for binding of proteins (Zetsche et al. Nat Biotechnol. 2015; 33(2):139-42 describes the use of this system for Cas9).

[0480] Further, when introduced in the cell as DNA, the RNA targeting effector protein of the inventions can be modulated by inducible promoters, such as tetracycline or doxycycline controlled transcriptional activation (Tet-On and Tet-Off expression system), hormone inducible gene expression system such as for instance an ecdysone inducible gene expression system and an arabinose-inducible gene expression system. When delivered as RNA, expression of the RNA targeting effector protein can be modulated via a riboswitch, which can sense a small molecule like tetracycline (as described in Goldfless et al. Nucleic Acids Res. 2012; 40(9):e64).

[0481] In one embodiment, the delivery of the RNA targeting effector protein of the invention can be modulated to change the amount of protein or crRNA in the cell, thereby changing the magnitude of the desired effect or any undesired off-target effects.

[0482] In one embodiment, the RNA targeting effector proteins described herein can be designed to be self-inactivating. When delivered to a cell as RNA, either mRNA or as a replication RNA therapeutic (Wrobleska et al Nat Biotechnol. 2015 August; 33(8): 839-841), they can self-inactivate expression and subsequent effects by destroying the own RNA, thereby reducing residency and potential undesirable effects.

[0483] For further in vivo applications of RNA targeting effector proteins as described herein, reference is made to Mackay J P et al (Nat Struct Mol Biol. 2011 March; 18(3):256-61), Nelles et al (Bioessays. 2015 July; 37(7):732-9) and Abil Z and Zhao H (Mol Biosyst. 2015 October; 11(10):2658-65), which are incorporated herein by reference. In particular, the following applications are envisaged in certain embodiments of the invention, preferably in certain embodiments by using catalytically inactive Cas13c: enhancing translation (e.g. Cas13c—translation promotion factor fusions (e.g. eIF4 fusions)); repressing translation (e.g. gRNA targeting ribosome binding sites); exon skipping (e.g. gRNAs targeting splice donor and/or acceptor sites); exon inclusion (e.g. gRNA targeting a particular exon splice donor and/or acceptor site to be included or Cas13c fused to or recruiting spliceosome components (e.g. U1 snRNA)); accessing RNA localization (e.g. Cas13c—marker fusions (e.g.EGFP fusions)); altering RNA localization (e.g. Cas13c—localization signal fusions (e.g. NLS or NES fusions)); RNA degradation (in this case no catalytically inactive Cas13c is to be used if relied on the activity of Cas13c, alternatively and for increased specificity, a split Cas13c may be used); inhibition of non-coding RNA function (e.g. miRNA), such as by degradation or binding of gRNA to functional sites (possibly titrating out at specific sites by relocalization by Cas13c-signal sequence fusions).

[0484] As described herein before and demonstrated in the Examples, Cas13c function is robust to 5′ or 3′ extensions of the crRNA and to extension of the crRNA loop. It is therefore envisages that MS2 loops and other recruitment domains can be added to the crRNA without affecting complex formation and binding to target transcripts. Such modifications to the crRNA for recruitment of various effector domains are applicable in the uses of a RNA targeted effector proteins described above.

[0485] Cas13c is capable of mediating resistance to RNA phages. It is therefore envisaged that Cas13c can be used to immunize, e.g. animals, humans and plants, against RNA-only pathogens, including but not limited to retroviruses (e.g. lentiviruses, such as HIV), HCV, Ebola virus and Zika virus.

[0486] Cas13c can process (cleave) its own array. This applies to both the wildtype Cas13c protein and mutated Cas13c protein containing one or more mutated amino acid residues R597, H602, R1278 and H1283, relative to D2c2 residues, such as one or more of the modifications selected from R597A, H602A, R1278A and H1283A. It is therefore envisaged that multiple crRNAs designed for different target transcripts and/or applications can be delivered as a single pre-crRNA or as a single transcript driven by one promotor. Such method of delivery has the advantages that it is substantially more compact, easier to synthesize and easier to delivery in viral systems. Preferably, amino acid numbering as described herein refers to Lsh C2c2 protein. It will be understood that exact amino acid positions may vary for orthologues of Lsh C2c2, which can be adequately determined by protein alignment, as is known in the art, and as described herein elsewhere.

[0487] Aspects of the invention also encompass methods and uses of the compositions and systems described herein in genome or transcriptome engineering, e.g. for altering or manipulating the (protein) expression of one or more genes or the one or more gene products, in prokaryotic or eukaryotic cells, in vitro, in vivo or ex vivo.

[0488] In an aspect, the invention provides methods and compositions for modulating, e.g., reducing, (protein) expression of a target RNA in cells. In the subject methods, a Cas13c system of the invention is provided that interferes with transcription, stability, and/or translation of an RNA.

[0489] In certain embodiments, an effective amount of Cas13c system is used to cleave RNA or otherwise inhibit RNA expression. In this regard, the system has uses similar to siRNA and shRNA, thus can also be substituted for such methods. The method includes, without limitation, use of a Cas13c system as a substitute for e.g., an interfering ribonucleic acid (such as an siRNA or shRNA) or a transcription template thereof, e.g., a DNA encoding an shRNA. The Cas13c system is introduced into a target cell, e.g., by being administered to a mammal that includes the target cell,

[0490] Advantageously, a Cas13c system of the invention is specific. For example, whereas interfering ribonucleic acid (such as an siRNA or shRNA) polynucleotide systems are plagued by design and stability issues and off-target binding, a Cas13c system of the invention can be designed with high specificity.

### Destabilized Cas13c

[0491] In certain embodiments, the effecteor protein (CRISPR enzyme; Cas13c) according to the invention as described herein is associated with or fused to a destabilization domain (DD). In some embodiments, the DD is ER50. A corresponding stabilizing ligand for this DD is, in some embodiments, 4HT. As such, in some embodiments, one of the at least one DDs is ER50 and a stabilizing ligand therefor is 4HT. or CMP8 In some embodiments, the DD is DHFR50. A corresponding stabilizing ligand for this DD is, in some embodiments, TMP. As such, in some embodiments, one of the at least one DDs is DHFR50 and a stabilizing ligand therefor is TMP. In some embodiments, the DD is ER50. A corresponding stabilizing ligand for this DD is, in some embodiments, CMP8. CMP8 may therefore be an alternative stabilizing ligand to 4HT in the ER50 system. While it may be possible that CMP8 and 4HT can/should be used in a competitive matter, some cell types may be more susceptible to one or the other of these two ligands, and from this disclosure and the knowledge in the art the skilled person can use CMP8 and/or 4HT.

[0492] In some embodiments, one or two DDs may be fused to the N-terminal end of the CRISPR enzyme with one or two DDs fused to the C-terminal of the CRISPR enzyme. In some embodiments, the at least two DDs are associated with the CRISPR enzyme and the DDs are the same DD, i.e. the DDs are homologous. Thus, both (or two or more) of the DDs could be ER50 DDs. This is preferred in some embodiments. Alternatively, both (or two or more) of the DDs could be DHFR50 DDs. This is also preferred in some embodiments. In some embodiments, the at least two DDs are associated with the CRISPR enzyme and the DDs are different DDs, i.e. the DDs are heterologous. Thus, one of the DDS could be ER50 while one or more of the DDs or any other DDs could be DHFR50. Having two or more DDs which are heterologous may be advantageous as it would provide a greater level of degradation control. A tandem fusion of more than one DD at the N or C-term may enhance degradation; and such a tandem fusion can be, for example ER50-ER50-Cas13c or DHFR-DHFR-Cas13c. It is envisaged that high levels of degradation would occur in the absence of either stabilizing ligand, intermediate levels of degradation would occur in the absence of one stabilizing ligand and the presence of the other (or another) stabilizing ligand, while low levels of degradation would occur in the presence of both (or two of more) of the stabilizing ligands. Control may also be imparted by having an N-terminal ER50 DD and a C-terminal DHFR50 DD.

[0493] In some embodiments, the fusion of the CRISPR enzyme with the DD comprises a linker between the DD and the CRISPR enzyme. In some embodiments, the linker is a GlySer linker. In some embodiments, the DD-CRISPR enzyme further comprises at least one Nuclear Export Signal (NES). In some embodiments, the DD-CRISPR enzyme comprises two or more NESs. In some embodiments, the DD-CRISPR enzyme comprises at least one Nuclear Localization Signal (NLS). This may be in addition to an NES. In some embodiments, the CRISPR enzyme comprises or consists essentially of or consists of a localization (nuclear import or export) signal as, or as part of, the linker between the CRISPR enzyme and the DD. HA or Flag tags are also within the ambit of the invention as linkers. Applicants use NLS and/or NES as linker and also use Glycine Serine linkers as short as GS up to (GGGGS)₃ (SEQ ID No. 20)

[0494] Destabilizing domains have general utility to confer instability to a wide range of proteins; see, e.g., Miyazaki, J Am Chem Soc. Mar. 7, 2012; 134(9): 3942-3945, incorporated herein by reference. CMP8 or 4-hydroxytamoxifen can be destabilizing domains. More generally, A temperature-sensitive mutant of mammalian DHFR (DHFRts), a destabilizing residue by the N-end rule, was found to be stable at a permissive temperature but unstable at 37° C. The addition of methotrexate, a high-affinity ligand for mammalian DHFR, to cells expressing DHFRts inhibited degradation of the protein partially. This was an important demonstration that a small molecule ligand can stabilize a protein otherwise targeted for degradation in cells. A rapamycin derivative was used to stabilize an unstable mutant of the FRB domain of mTOR (FRB*) and restore the function of the fused kinase, GSK-3β.6,7 This system demonstrated that ligand-dependent stability represented an attractive strategy to regulate the function of a specific protein in a complex biological environment. A system to control protein activity can involve the DD becoming functional when the ubiquitin complementation occurs by rapamycin induced dimerization of FK506-binding protein and FKBP12. Mutants of human FKBP12 or ecDHFR protein can be engineered to be metabolically unstable in the absence of their high-affinity ligands, Shield-1 or trimethoprim (TMP), respectively. These mutants are some of the possible destabilizing domains (DDs) useful in the practice of the invention and instability of a DD as a fusion with a CRISPR enzyme confers to the CRISPR protein degradation of the entire fusion protein by the proteasome. Shield-1 and TMP bind to and stabilize the DD in a dose-dependent manner. The estrogen receptor ligand binding domain (ERLBD, residues 305-549 of ERS1) can also be engineered as a destabilizing domain. Since the estrogen receptor signaling pathway is involved in a variety of diseases such as breast cancer, the pathway has been widely studied and numerous agonist and antagonists of estrogen receptor have been developed. Thus, compatible pairs of ERLBD and drugs are known. There are ligands that bind to mutant but not wild-type forms of the ERLBD. By using one of these mutant domains encoding three mutations (L384M, M421G, G521R)12, it is possible to regulate the stability of an ERLBD-derived DD using a ligand that does not perturb endogenous estrogen-sensitive networks. An additional mutation (Y537S) can be introduced to further destabilize the ERLBD and to configure it as a potential DD candidate. This tetra-mutant is an advantageous DD development. The mutant ERLBD can be fused to a CRISPR enzyme and its stability can be regulated or perturbed using a ligand, whereby the CRISPR enzyme has a DD. Another DD can be a 12-kDa (107-amino-acid) tag based on a mutated FKBP protein, stabilized by Shieldl ligand; see, e.g., Nature Methods 5, (2008). For instance a DD can be a modified FK506 binding protein 12 (FKBP12) that binds to and is reversibly stabilized by a synthetic, biologically inert small molecule, Shield-1; see, e.g., Banaszynski L A, Chen L C, Maynard-Smith L A, Ooi A G, Wandless T J. A rapid, reversible, and tunable method to regulate protein function in living cells using synthetic small molecules. Cell. 2006; 126:995-1004; Banaszynski L A, Sellmyer M A, Contag C H, Wandless T J, Thorne S H. Chemical control of protein stability and function in living mice. Nat Med. 2008; 14:1123-1127; Maynard-Smith L A, Chen L C, Banaszynski L A, Ooi A G, Wandless T J. A directed approach for engineering conditional protein stability using biologically silent small molecules. The Journal of biological chemistry. 2007; 282:24866-24872; and Rodriguez, Chem Biol. Mar. 23, 2012; 19(3): 391-398—all of which are incorporated herein by reference and may be employed in the practice of the invention in selected a DD to associate with a CRISPR enzyme in the practice of this invention. As can be seen, the knowledge in the art includes a number of DDs, and the DD can be associated with, e.g., fused to, advantageously with a linker, to a CRISPR enzyme, whereby the DD can be stabilized in the presence of a ligand and when there is the absence thereof the DD can become destabilized, whereby the CRISPR enzyme is entirely destabilized, or the DD can be stabilized in the absence of a ligand and when the ligand is present the DD can become destabilized; the DD allows the CRISPR enzyme and hence the CRISPR-Cas complex or system to be regulated or controlled—turned on or off so to speak, to thereby provide means for regulation or control of the system, e.g., in an in vivo or in vitro environment. For instance, when a protein of interest is expressed as a fusion with the DD tag, it is destabilized and rapidly degraded in the cell, e.g., by proteasomes. Thus, absence of stabilizing ligand leads to a D associated Cas being degraded. When a new DD is fused to a protein of interest, its instability is conferred to the protein of interest, resulting in the rapid degradation of the entire fusion protein. Peak activity for Cas is sometimes beneficial to reduce off-target effects. Thus, short bursts of high activity are preferred. The present invention is able to provide such peaks. In some senses the system is inducible. In some other senses, the system repressed in the absence of stabilizing ligand and de-repressed in the presence of stabilizing ligand.

### Application of RNA TargetingRNA Targeting-CRISPR System to Plants and Yeast

### Definitions

[0495] In general, the term “plant” relates to any various photosynthetic, eukaryotic, unicellular or multicellular organism of the kingdom Plantae characteristically growing by cell division, containing chloroplasts, and having cell walls comprised of cellulose. The term plant encompasses monocotyledonous and dicotyledonous plants. Specifically, the plants are intended to comprise without limitation angiosperm and gymnosperm plants such as acacia, alfalfa, amaranth, apple, apricot, artichoke, ash tree, asparagus, avocado, banana, barley, beans, beet, birch, beech, blackberry, blueberry, broccoli, Brussel's sprouts, cabbage, canola, cantaloupe, carrot, cassava, cauliflower, cedar, a cereal, celery, chestnut, cherry, Chinese cabbage, citrus, clementine, clover, coffee, corn, cotton, cowpea, cucumber, cypress, eggplant, elm, endive, eucalyptus, fennel, figs, fir, geranium, grape, grapefruit, groundnuts, ground cherry, gum hemlock, hickory, kale, kiwifruit, kohlrabi, larch, lettuce, leek, lemon, lime, locust, pine, maidenhair, maize, mango, maple, melon, millet, mushroom, mustard, nuts, oak, oats, oil palm, okra, onion, orange, an ornamental plant or flower or tree, papaya, palm, parsley, parsnip, pea, peach, peanut, pear, peat, pepper, persimmon, pigeon pea, pine, pineapple, plantain, plum, pomegranate, potato, pumpkin, radicchio, radish, rapeseed, raspberry, rice, rye, sorghum, safflower, sallow, soybean, spinach, spruce, squash, strawberry, sugar beet, sugarcane, sunflower, sweet potato, sweet corn, tangerine, tea, tobacco, tomato, trees, triticale, turf grasses, turnips, vine, walnut, watercress, watermelon, wheat, yams, yew, and zucchini. The term plant also encompasses Algae, which are mainly photoautotrophs unified primarily by their lack of roots, leaves and other organs that characterize higher plants.

[0496] The methods for modulating gene expression using the RNA targetingRNA targeting system as described herein can be used to confer desired traits on essentially any plant. A wide variety of plants and plant cell systems may be engineered for the desired physiological and agronomic characteristics described herein using the nucleic acid constructs of the present disclosure and the various transformation methods mentioned above. In preferred embodiments, target plants and plant cells for engineering include, but are not limited to, those monocotyledonous and dicotyledonous plants, such as crops including grain crops (e.g., wheat, maize, rice, millet, barley), fruit crops (e.g., tomato, apple, pear, strawberry, orange), forage crops (e.g., alfalfa); root vegetable crops (e.g., carrot, potato, sugar beets, yarn), leafy vegetable crops (e.g., lettuce, spinach); flowering plants (e.g., petunia, rose, chrysanthemum), conifers and pine trees (e.g., pine fir, spruce); plants used in phytoremediation (e.g., heavy metal accumulating plants); oil crops (e.g., sunflower, rape seed) and plants used for experimental purposes (e.g., Arabidopsis). Thus; the methods and CRISPR-Cas systems can be used over a broad range of plants, such as for example with dicotyledonous plants belonging to the orders Magniolales, Illiciales, Laurales, Piperales, Aristochiales, Nymphaeales, Ranunculales, Papeverales, Sarraceniaceae, Trochodendrales, Hamamelidales, Eucomiales, Leitneriales, Myricales, Fagales, Casuarinales, Caryophyllales, Batales, Polygonales, Plumbaginales, Dilleniales, Theales, Malvales, Urticales, Lecythidales, Violales, Salicales, Capparales, Ericales, Diapensales, Ebenales, Prirnulales, Rosales, Fabales, Podostemales, Haloragales, Myrtales, Cornales, Proteales, San tales, Rafflesiales, Celastrales, Euphorbiales, Rhamnales, Sapindales, Juglandales, Geraniales, Polygalales, Umbellales, Gentianales, Polemoniales, Lamiales, Plantaginales, Scrophulariales, Campanulales, Rubiales, Dipsacales, and Asterales; the methods and CRISPR-Cas systems can be used with monocotyledonous plants such as those belonging to the orders Alismatales, Hydrocharitales, Najadales, Triuridales, Commelinales, Eriocaulales, Restionales, Poales, Juncales, Cyperales, Typhales, Bromeliales, Zingiberales, Arecales, Cyclanthales, Pandanales; Arales, Lilliales, and Orchid ales, or with plants belonging to Gymnospermae, e.g. those belonging to the orders Pinales, Ginkgoales, Cycadales, Araucariales, Cupressales and Gnetales.

[0497] The RNA targetingRNA targeting CRISPR systems and methods of use described herein can be used over a broad range of plant species, included in the non-limitative list of dicot, monocot or gymnosperm genera hereunder: Atropa, Alseodaphne, Anacardium, Arachis, Beilschmiedia, Brassica, Carthamus, Cocculus, Croton, Cucumis, Citrus, Citrullus, Capsicum, Catharanthus, Cocos, Coflea, Cucurbita, Daucus, Duguetia, Eschscholzia, Ficus, Fragaria, Glaucium, Glycine, Gossypium, Helianthus, Hevea, Hyoscyamus, Lactuca, Landolphia, Limum, Litsea, Lycopersicon, Lupines, Manihot, Majorana, Malta, Medicago, Nicotiana, Olea, Parthenium, Papaver, Persea, Phaseolus, Pistacia, Pisum, Pyrus, Prunus, Raphanus, Ricinus, Senecio, Sinomenium, Stephania, Sinapis, Solanum, Theobroma, Trifolium, Trigonella, Vida, Vinca, Vilis, and Vigna; and the genera Allium, Andropogon, Aragrostis, Asparagus, Avena, cynodon, Elaeis, Festuca, Festulolium, Heterocallis, Hordeum, Lonna, Lolium, Musa, Oryza, Panicum, Pannesetum, Phleum, Poa, Secale, Sorghum, Triticum, Zea, Abies, Cunninghamia, Ephedra, Picea, Pinus, and Pseudotsuga.

[0498] The RNA targeting CRISPR systems and methods of use can also be used over a broad range of “algae” or “algae cells”; including for example algea selected from several eukaryotic phyla, including the Rhodophyta (red algae), Chlorophyta (green algae), Phaeophyta (brown algae), Bacillariophyta (diatoms), Eustigmatophyta and dinoflagellates as well as the prokaryotic phylum Cyanobacteria (blue-green algae). The term “algae” includes for example algae selected from Amphora, Anabaena, Anikstrodesmis, Botryococcus, Chaetoceros, Chlamydomonas, Chlorella, Chlorococcum, Cylclotella, Cylindrotheca, Dunaliella, Emiliana, Euglena, Hematococcus, Isochrysis, Monochrysis, Monoraphidium, Nannochloris, Nannnochloropsis, Navicula, Nephrochloris, Nephroselmis, Nitzschia, Nodularia, Nostoc, Oochromonas, Oocystis, Oscillartoria, Pavlova, Phaeodactylum, Playtmonas, Pleurochrysis, Porhyra, Pseudoanabaena, Pyratnimonas, Stichococcus, Synechococcus, Synechocystis, Tetraselmis, Thalassiosira, and Trichodesmium.

[0499] A part of a plant, i.e., a “plant tissue” may be treated according to the methods of the present invention to produce an improved plant. Plant tissue also encompasses plant cells. The term “plant cell” as used herein refers to individual units of a living plant, either in an intact whole plant or in an isolated form grown in in vitro tissue cultures, on media or agar, in suspension in a growth media or buffer or as a part of higher organized unites, such as, for example, plant tissue, a plant organ, or a whole plant.

[0500] A “protoplast” refers to a plant cell that has had its protective cell wall completely or partially removed using, for example, mechanical or enzymatic means resulting in an intact biochemical competent unit of living plant that can reform their cell wall, proliferate and regenerate grow into a whole plant under proper growing conditions.

[0501] The term “transformation” broadly refers to the process by which a plant host is genetically modified by the introduction of DNA by means of Agrobacteria or one of a variety of chemical or physical methods. As used herein, the term “plant host” refers to plants, including any cells, tissues, organs, or progeny of the plants. Many suitable plant tissues or plant cells can be transformed and include, but are not limited to, protoplasts, somatic embryos, pollen, leaves, seedlings, stems, calli, stolons, microtubers, and shoots. A plant tissue also refers to any clone of such a plant, seed, progeny, propagule whether generated sexually or asexually, and descendents of any of these, such as cuttings or seed.

[0502] The term “transformed” as used herein, refers to a cell, tissue, organ, or organism into which a foreign DNA molecule, such as a construct, has been introduced. The introduced DNA molecule may be integrated into the genomic DNA of the recipient cell, tissue, organ, or organism such that the introduced DNA molecule is transmitted to the subsequent progeny. In these embodiments, the “transformed” or “transgenic” cell or plant may also include progeny of the cell or plant and progeny produced from a breeding program employing such a transformed plant as a parent in a cross and exhibiting an altered phenotype resulting from the presence of the introduced DNA molecule. Preferably, the transgenic plant is fertile and capable of transmitting the introduced DNA to progeny through sexual reproduction.

[0503] The term “progeny”, such as the progeny of a transgenic plant, is one that is born of, begotten by, or derived from a plant or the transgenic plant. The introduced DNA molecule may also be transiently introduced into the recipient cell such that the introduced DNA molecule is not inherited by subsequent progeny and thus not considered “transgenic”. Accordingly, as used herein, a “non-transgenic” plant or plant cell is a plant which does not contain a foreign DNA stably integrated into its genome.

[0504] The term “plant promoter” as used herein is a promoter capable of initiating transcription in plant cells, whether or not its origin is a plant cell. Exemplary suitable plant promoters include, but are not limited to, those that are obtained from plants, plant viruses, and bacteria such as Agrobacterium or Rhizobium which comprise genes expressed in plant cells.

[0505] As used herein, a “fungal cell” refers to any type of eukaryotic cell within the kingdom of fungi. Phyla within the kingdom of fungi include Ascomycota, Basidiomycota, Blastocladiomycota, Chytridiomycota, Glomeromycota, Microsporidia, and Neocallimastigomycota. Fungal cells may include yeasts, molds, and filamentous fungi. In some embodiments, the fungal cell is a yeast cell.

[0506] As used herein, the term “yeast cell” refers to any fungal cell within the phyla Ascomycota and Basidiomycota. Yeast cells may include budding yeast cells, fission yeast cells, and mold cells. Without being limited to these organisms, many types of yeast used in laboratory and industrial settings are part of the phylum Ascomycota. In some embodiments, the yeast cell is an S. cerervisiae, Kluyveromyces marxianus, or Issatchenkia orientalis cell. Other yeast cells may include without limitation Candida spp. (e.g., Candida albicans), Yarrowia spp. (e.g., Yarrowia lipolytica), Pichia spp. (e.g., Pichia pastoris), Kluyveromyces spp. (e.g., Kluyveromyces lactis and Kluyveromyces marxianus), Neurospora spp. (e.g., Neurospora crassa), Fusarium spp. (e.g., Fusarium oxysporum), and Issatchenkia spp. (e.g., Issatchenkia orientalis, a.k.a. Pichia kudriavzevii and Candida acidothermophilum). In some embodiments, the fungal cell is a filamentous fungal cell. As used herein, the term “filamentous fungal cell” refers to any type of fungal cell that grows in filaments, i.e., hyphae or mycelia. Examples of filamentous fungal cells may include without limitation Aspergillus spp. (e.g., Aspergillus niger), Trichoderma spp. (e.g., Trichoderma reesei), Rhizopus spp. (e.g., Rhizopus oryzae), and Mortierella spp. (e.g., Mortierella isabellina).

[0507] In some embodiments, the fungal cell is an industrial strain. As used herein, “industrial strain” refers to any strain of fungal cell used in or isolated from an industrial process, e.g., production of a product on a commercial or industrial scale. Industrial strain may refer to a fungal species that is typically used in an industrial process, or it may refer to an isolate of a fungal species that may be also used for non-industrial purposes (e.g., laboratory research). Examples of industrial processes may include fermentation (e.g., in production of food or beverage products), distillation, biofuel production, production of a compound, and production of a polypeptide. Examples of industrial strains may include, without limitation, JAY270 and ATCC4124.

[0508] In some embodiments, the fungal cell is a polyploid cell. As used herein, a “polyploid” cell may refer to any cell whose genome is present in more than one copy. A polyploid cell may refer to a type of cell that is naturally found in a polyploid state, or it may refer to a cell that has been induced to exist in a polyploid state (e.g., through specific regulation, alteration, inactivation, activation, or modification of meiosis, cytokinesis, or DNA replication). A polyploid cell may refer to a cell whose entire genome is polyploid, or it may refer to a cell that is polyploid in a particular genomic locus of interest. Without wishing to be bound to theory, it is thought that the abundance of guideRNA may more often be a rate-limiting component in genome engineering of polyploid cells than in haploid cells, and thus the methods using the Cas13c CRISPRS system described herein may take advantage of using a certain fungal cell type.

[0509] In some embodiments, the fungal cell is a diploid cell. As used herein, a “diploid” cell may refer to any cell whose genome is present in two copies. A diploid cell may refer to a type of cell that is naturally found in a diploid state, or it may refer to a cell that has been induced to exist in a diploid state (e.g., through specific regulation, alteration, inactivation, activation, or modification of meiosis, cytokinesis, or DNA replication). For example, the S. cerevisiae strain S228C may be maintained in a haploid or diploid state. A diploid cell may refer to a cell whose entire genome is diploid, or it may refer to a cell that is diploid in a particular genomic locus of interest. In some embodiments, the fungal cell is a haploid cell. As used herein, a “haploid” cell may refer to any cell whose genome is present in one copy. A haploid cell may refer to a type of cell that is naturally found in a haploid state, or it may refer to a cell that has been induced to exist in a haploid state (e.g., through specific regulation, alteration, inactivation, activation, or modification of meiosis, cytokinesis, or DNA replication). For example, the S. cerevisiae strain S228C may be maintained in a haploid or diploid state. A haploid cell may refer to a cell whose entire genome is haploid, or it may refer to a cell that is haploid in a particular genomic locus of interest.

[0510] As used herein, a “yeast expression vector” refers to a nucleic acid that contains one or more sequences encoding an RNA and/or polypeptide and may further contain any desired elements that control the expression of the nucleic acid(s), as well as any elements that enable the replication and maintenance of the expression vector inside the yeast cell. Many suitable yeast expression vectors and features thereof are known in the art; for example, various vectors and techniques are illustrated in Yeast Protocols, 2nd edition, Xiao, W., ed. (Humana Press, New York, 2007) and Buckholz, R. G. and Gleeson, M. A. (1991) Biotechnology (NY) 9(11): 1067-72. Yeast vectors may contain, without limitation, a centromeric (CEN) sequence, an autonomous replication sequence (ARS), a promoter, such as an RNA Polymerase III promoter, operably linked to a sequence or gene of interest, a terminator such as an RNA polymerase III terminator, an origin of replication, and a marker gene (e.g., auxotrophic, antibiotic, or other selectable markers). Examples of expression vectors for use in yeast may include plasmids, yeast artificial chromosomes, 2μ plasmids, yeast integrative plasmids, yeast replicative plasmids, shuttle vectors, and episomal plasmids.

### Stable Integration of RNA Targeting CRISP System Components in the Genome of Plants and Plant Cells

[0511] In particular embodiments, it is envisaged that the polynucleotides encoding the components of the RNA targeting CRISPR system are introduced for stable integration into the genome of a plant cell. In these embodiments, the design of the transformation vector or the expression system can be adjusted depending on when, where and under what conditions the guide RNA and/or the RNA targeting gene(s) are expressed.

[0512] In particular embodiments, it is envisaged to introduce the components of the RNA targeting CRISPR system stably into the genomic DNA of a plant cell. Additionally or alternatively, it is envisaged to introduce the components of the RNA targeting CRISPR system for stable integration into the DNA of a plant organelle such as, but not limited to a plastid, e mitochondrion or a chloroplast.

[0513] The expression system for stable integration into the genome of a plant cell may contain one or more of the following elements: a promoter element that can be used to express the guide RNA and/or RNA targeting enzyme in a plant cell; a 5′ untranslated region to enhance expression; an intron element to further enhance expression in certain cells, such as monocot cells; a multiple-cloning site to provide convenient restriction sites for inserting the one or more guide RNAs and/or the RNA targeting gene sequences and other desired elements; and a 3′ untranslated region to provide for efficient termination of the expressed transcript.

[0514] The elements of the expression system may be on one or more expression constructs which are either circular such as a plasmid or transformation vector, or non-circular such as linear double stranded DNA.

[0515] In a particular embodiment, a RNA targeting CRISPR expression system comprises at least:
[0516] (a) a nucleotide sequence encoding a guide RNA (gRNA) that hybridizes with a target sequence in a plant, and wherein the guide RNA comprises a guide sequence and a direct repeat sequence, and
[0517] (b) a nucleotide sequence encoding a RNA targeting protein,
   wherein components (a) or (b) are located on the same or on different constructs, and whereby the different nucleotide sequences can be under control of the same or a different regulatory element operable in a plant cell.

[0518] DNA construct(s) containing the components of the RNA targeting CRISPR system and, where applicable, template sequence may be introduced into the genome of a plant, plant part, or plant cell by a variety of conventional techniques. The process generally comprises the steps of selecting a suitable host cell or host tissue, introducing the construct(s) into the host cell or host tissue, and regenerating plant cells or plants therefrom.

[0519] In particular embodiments, the DNA construct may be introduced into the plant cell using techniques such as but not limited to electroporation, microinjection, aerosol beam injection of plant cell protoplasts, or the DNA constructs can be introduced directly to plant tissue using biolistic methods, such as DNA particle bombardment (see also Fu et al., Transgenic Res. 2000 February; 9(1):11-9). The basis of particle bombardment is the acceleration of particles coated with gene/s of interest toward cells, resulting in the penetration of the protoplasm by the particles and typically stable integration into the genome. (see e.g. Klein et al, Nature (1987), Klein et al, Bio/Technology (1992), Casas et al, Proc. Natl. Acad. Sci. USA (1993)).

[0520] In particular embodiments, the DNA constructs containing components of the RNA targeting CRISPR system may be introduced into the plant by Agrobacterium-mediated transformation. The DNA constructs may be combined with suitable T-DNA flanking regions and introduced into a conventional Agrobacterium tumefaciens host vector. The foreign DNA can be incorporated into the genome of plants by infecting the plants or by incubating plant protoplasts with Agrobacterium bacteria, containing one or more Ti (tumor-inducing) plasmids. (see e.g. Fraley et al., (1985), Rogers et al., (1987) and U.S. Pat. No. 5,563,055).

### Plant Promoters

[0521] In order to ensure appropriate expression in a plant cell, the components of the Cas13c CRISPR system described herein are typically placed under control of a plant promoter; i.e. a promoter operable in plant cells. The use of different types of promoters is envisaged.

[0522] A constitutive plant promoter is a promoter that is able to express the open reading frame (ORF) that it controls in all or nearly all of the plant tissues during all or nearly all developmental stages of the plant (referred to as “constitutive expression”). One non-limiting example of a constitutive promoter is the cauliflower mosaic virus 35S promoter. The present invention envisages methods for modifying RNA sequences and as such also envisages regulating expression of plant biomolecules. In particular embodiments of the present invention it is thus advantageous to place one or more elements of the RNA targeting CRISPR system under the control of a promoter that can be regulated. “Regulated promoter” refers to promoters that direct gene expression not constitutively, but in a temporally- and/or spatially-regulated manner, and includes tissue-specific, tissue-preferred and inducible promoters. Different promoters may direct the expression of a gene in different tissues or cell types, or at different stages of development, or in response to different environmental conditions. In particular embodiments, one or more of the RNA targeting CRISPR components are expressed under the control of a constitutive promoter, such as the cauliflower mosaic virus 35S promoter issue-preferred promoters can be utilized to target enhanced expression in certain cell types within a particular plant tissue, for instance vascular cells in leaves or roots or in specific cells of the seed. Examples of particular promoters for use in the RNA targeting CRISPR system—are found in Kawamata et al., (1997) Plant Cell Physiol 38:792-803; Yamamoto et al., (1997) Plant J 12:255-65; Hire et al, (1992) Plant Mol Biol 20:207-18, Kuster et al, (1995) Plant Mol Biol 29:759-72, and Capana et al., (1994) Plant Mol Biol 25:681-91.

[0523] Examples of promoters that are inducible and that allow for spatiotemporal control of gene editing or gene expression may use a form of energy. The form of energy may include but is not limited to sound energy, electromagnetic radiation, chemical energy and/or thermal energy. Examples of inducible systems include tetracycline inducible promoters (Tet-On or Tet-Off), small molecule two-hybrid transcription activations systems (FKBP, ABA, etc), or light inducible systems (Phytochrome, LOV domains, or cryptochrome), such as a Light Inducible Transcriptional Effector (LITE) that direct changes in transcriptional activity in a sequence-specific manner. The components of a light inducible system may include a RNA targeting CRISPR enzyme, a light-responsive cytochrome heterodimer (e.g. from Arabidopsis thaliana), and a transcriptional activation/repression domain. Further examples of inducible DNA binding proteins and methods for their use are provided in U.S. 61/736,465 and U.S. 61/721,283, which is hereby incorporated by reference in its entirety.

[0524] In particular embodiments, transient or inducible expression can be achieved by using, for example, chemical-regulated promoters, i.e. whereby the application of an exogenous chemical induces gene expression. Modulating of gene expression can also be obtained by a chemical-repressible promoter, where application of the chemical represses gene expression. Chemical-inducible promoters include, but are not limited to, the maize ln2-2 promoter, activated by benzene sulfonamide herbicide safeners (De Veylder et al., (1997) Plant Cell Physiol 38:568-77), the maize GST promoter (GST-II-27, WO93/01294), activated by hydrophobic electrophilic compounds used as pre-emergent herbicides, and the tobacco PR-1 a promoter (Ono et al., (2004) Biosci Biotechnol Biochem 68:803-7) activated by salicylic acid. Promoters which are regulated by antibiotics, such as tetracycline-inducible and tetracycline-repressible promoters (Gatz et al., (1991) Mol Gen Genet 227:229-37; U.S. Pat. Nos. 5,814,618 and 5,789,156) can also be used herein.

Translocation to and/or Expression in Specific Plant Organelles

[0525] The expression system may comprise elements for translocation to and/or expression in a specific plant organelle.

### Chloroplast Targeting

[0526] In particular embodiments, it is envisaged that the RNA targeting CRISPR system is used to specifically modify expression and/or translation of chloroplast genes or to ensure expression in the chloroplast. For this purpose use is made of chloroplast transformation methods or compartimentalization of the RNA targeting CRISPR components to the chloroplast. For instance, the introduction of genetic modifications in the plastid genome can reduce biosafety issues such as gene flow through pollen.

[0527] Methods of chloroplast transformation are known in the art and include Particle bombardment, PEG treatment, and microinjection. Additionally, methods involving the translocation of transformation cassettes from the nuclear genome to the plastid can be used as described in WO2010061186.

[0528] Alternatively, it is envisaged to target one or more of the RNA targeting CRISPR components to the plant chloroplast. This is achieved by incorporating in the expression construct a sequence encoding a chloroplast transit peptide (CTP) or plastid transit peptide, operably linked to the 5′ region of the sequence encoding the RNA targeting protein. The CTP is removed in a processing step during translocation into the chloroplast. Chloroplast targeting of expressed proteins is well known to the skilled artisan (see for instance Protein Transport into Chloroplasts, 2010, Annual Review of Plant Biology, Vol. 61: 157-180). In such embodiments it is also desired to target the one or more guide RNAs to the plant chloroplast. Methods and constructs which can be used for translocating guide RNA into the chloroplast by means of a chloroplast localization sequence are described, for instance, in US 20040142476, incorporated herein by reference. Such variations of constructs can be incorporated into the expression systems of the invention to efficiently translocate the RNA targeting-guide RNA(s).

### Introduction of Polynucleotides Encoding the CRISPR RNA Targeting System in Algal Cells.

[0529] Transgenic algae (or other plants such as rape) may be particularly useful in the production of vegetable oils or biofuels such as alcohols (especially methanol and ethanol) or other products. These may be engineered to express or overexpress high levels of oil or alcohols for use in the oil or biofuel industries.

[0530] U.S. Pat. No. 8,945,839 describes a method for engineering Micro-Algae (Chlamydomonas reinhardtii cells) species) using Cas9. Using similar tools, the methods of the RNA targeting CRISPR system described herein can be applied on Chlamydomonas species and other algae. In particular embodiments, RNA targeting protein and guide RNA(s) are introduced in algae expressed using a vector that expresses RNA targeting protein under the control of a constitutive promoter such as Hsp70A-Rbc S2 or Beta2-tubulin. Guide RNA is optionally delivered using a vector containing T7 promoter. Alternatively, RNA targeting mRNA and in vitro transcribed guide RNA can be delivered to algal cells. Electroporation protocols are available to the skilled person such as the standard recommended protocol from the GeneArt Chlamydomonas Engineering kit.

### Introduction of Polynucleotides Encoding RNA Targeting Components in Yeast Cells

[0531] In particular embodiments, the invention relates to the use of the RNA targeting CRISPR system for RNA editing in yeast cells. Methods for transforming yeast cells which can be used to introduce polynucleotides encoding the RNA targeting CRISPR system components are well known to the artisan and are reviewed by Kawai et al., 2010, Bioeng Bugs. 2010 November-December; 1(6): 395-403). Non-limiting examples include transformation of yeast cells by lithium acetate treatment (which may further include carrier DNA and PEG treatment), bombardment or by electroporation.

### Transient Expression of RNA Targeting CRISP System Components in Plants and Plant Cell

[0532] In particular embodiments, it is envisaged that the guide RNA and/or RNA targeting gene are transiently expressed in the plant cell. In these embodiments, the RNA targeting CRISPR system can ensure modification of RNA target molecules only when both the guide RNA and the RNA targeting protein is present in a cell, such that gene expression can further be controlled. As the expression of the RNA targeting enzyme is transient, plants regenerated from such plant cells typically contain no foreign DNA, in particular embodiments the RNA targeting enzyme is stably expressed by the plant cell and the guide sequence is transiently expressed.

[0533] In particularly preferred embodiments, the RNA targeting CRISPR system components can be introduced in the plant cells using a plant viral vector (Scholthof et al. 1996, Annu Rev Phytopathol. 1996; 34:299-323). In further particular embodiments, said viral vector is a vector from a DNA virus. For example, geminivirus (e.g., cabbage leaf curl virus, bean yellow dwarf virus, wheat dwarf virus, tomato leaf curl virus, maize streak virus, tobacco leaf curl virus, or tomato golden mosaic virus) or nanovirus (e.g., Faba bean necrotic yellow virus). In other particular embodiments, said viral vector is a vector from an RNA virus. For example, tobravirus (e.g., tobacco rattle virus, tobacco mosaic virus), potexvirus (e.g., potato virus X), or hordeivirus (e.g., barley stripe mosaic virus). The replicating genomes of plant viruses are non-integrative vectors, which is of interest in the context of avoiding the production of GMO plants.

[0534] In particular embodiments, the vector used for transient expression of RNA targeting CRISPR constructs is for instance a pEAQ vector, which is tailored for Agrobacterium-mediated transient expression (Sainsbury F, et al., Plant Biotechnol J. 2009 September; 7(7):682-93) in the protoplast. Precise targeting of genomic locations was demonstrated using a modified Cabbage Leaf Curl virus (CaLCuV) vector to express gRNAs in stable transgenic plants expressing a CRISPR enzyme (Scientific Reports 5, Article number: 14926 (2015), doi:10.1038/srep14926).

[0535] In particular embodiments, double-stranded DNA fragments encoding the guide RNA and/or the RNA targeting gene can be transiently introduced into the plant cell. In such embodiments, the introduced double-stranded DNA fragments are provided in sufficient quantity to modify RNA molecule(s) in the cell but do not persist after a contemplated period of time has passed or after one or more cell divisions. Methods for direct DNA transfer in plants are known by the skilled artisan (see for instance Davey et al, Plant Mol Biol. 1989 September; 13(3):273-85.)

[0536] In other embodiments, an RNA polynucleotide encoding the RNA targeting protein is introduced into the plant cell, which is then translated and processed by the host cell generating the protein in sufficient quantity to modify the RNA molecule(s) cell (in the presence of at least one guide RNA) but which does not persist after a contemplated period of time has passed or after one or more cell divisions. Methods for introducing mRNA to plant protoplasts for transient expression are known by the skilled artisan (see for instance in Gallie, Plant Cell Reports (1993), 13; 119-122). Combinations of the different methods described above are also envisaged.

### Delivery of RNA Targeting CRISPR Components to the Plant Cell

[0537] In particular embodiments, it is of interest to deliver one or more components of the RNA targeting CRISPR system directly to the plant cell. This is of interest, inter alia, for the generation of non-transgenic plants (see below). In particular embodiments, one or more of the RNA targeting components is prepared outside the plant or plant cell and delivered to the cell. For instance in particular embodiments, the RNA targeting protein is prepared in vitro prior to introduction to the plant cell. RNA targeting protein can be prepared by various methods known by one of skill in the art and include recombinant production. After expression, the RNA targeting protein is isolated, refolded if needed, purified and optionally treated to remove any purification tags, such as a His-tag. Once crude, partially purified, or more completely purified RNA targeting protein is obtained, the protein may be introduced to the plant cell.

[0538] In particular embodiments, the RNA targeting protein is mixed with guide RNA targeting the RNA of interest to form a pre-assembled ribonucleoprotein.

[0539] The individual components or pre-assembled ribonucleoprotein can be introduced into the plant cell via electroporation, by bombardment with RNA targeting-associated gene product coated particles, by chemical transfection or by some other means of transport across a cell membrane. For instance, transfection of a plant protoplast with a pre-assembled CRISPR ribonucleoprotein has been demonstrated to ensure targeted modification of the plant genome (as described by Woo et al. Nature Biotechnology, 2015; DOI: 10.1038/nbt.3389). These methods can be modified to achieve targeted modification of RNA molecules in the plants.

[0540] In particular embodiments, the RNA targeting CRISPR system components are introduced into the plant cells using nanoparticles. The components, either as protein or nucleic acid or in a combination thereof, can be uploaded onto or packaged in nanoparticles and applied to the plants (such as for instance described in WO 2008042156 and US 20130185823). In particular, embodiments of the invention comprise nanoparticles uploaded with or packed with DNA molecule(s) encoding the RNA targeting protein, DNA molecules encoding the guide RNA and/or isolated guide RNA as described in WO2015089419.

[0541] Further means of introducing one or more components of the RNA targeting CRISPR system to the plant cell is by using cell penetrating peptides (CPP). Accordingly, in particular, embodiments the invention comprises compositions comprising a cell penetrating peptide linked to an RNA targeting protein. In particular embodiments of the present invention, an RNA targeting protein and/or guide RNA(s) is coupled to one or more CPPs to effectively transport them inside plant protoplasts (Ramakrishna (2014, Genome Res. 2014 June; 24(6):1020-7 for Cas9 in human cells). In other embodiments, the RNA targeting gene and/or guide RNA(s) are encoded by one or more circular or non-circular DNA molecule(s) which are coupled to one or more CPPs for plant protoplast delivery. The plant protoplasts are then regenerated to plant cells and further to plants. CPPs are generally described as short peptides of fewer than 35 amino acids either derived from proteins or from chimeric sequences which are capable of transporting biomolecules across cell membrane in a receptor independent manner. CPP can be cationic peptides, peptides having hydrophobic sequences, amphipatic peptides, peptides having proline-rich and -antimicrobial sequence, and chimeric or bipartite peptides (Pooga and Langel 2005). CPPs are able to penetrate biological membranes and as such trigger the movement of various biomolecules across cell membranes into the cytoplasm and to improve their intracellular routing, and hence facilitate interaction of the biolomolecule with the target. Examples of CPP include amongst others: Tat, a nuclear transcriptional activator protein required for viral replication by HIV typel, penetratin, Kaposi fibroblast growth factor (FGF) signal peptide sequence, integrin β3 signal peptide sequence; polyarginine peptide Args sequence, Guanine rich-molecular transporters, sweet arrow peptide, etc. . . . .

### Target RNA Envisaged for Plant, Algae or Fungal Applications

[0542] The target RNA, i.e. the RNA of interest, is the RNA to be targeted by the present invention leading to the recruitment to, and the binding of the RNA targeting protein at, the target site of interest on the target RNA. The target RNA may be any suitable form of RNA. This may include, in some embodiments, mRNA. In other embodiments, the target RNA may include transfer RNA (tRNA) or ribosomal RNA (rRNA). In other embodiments the target RNA may include interfering RNA (RNAi), tnicroRNA (miRNA), tnicroswitches, microzymes, satellite RNAs and RNA viruses. The target RNA may be located in the cytoplasm of the plant cell, or in the cell nucleus or in a plant cell organelle such as a mitochondrion, chloroplast or plastid.

[0543] In particular embodiments, the RNA targeting CRISPR system is used to cleave RNA or otherwise inhibit RNA expression.

### Use of RNA Targeting CRISPR System for Modulating Plant Gene Expression Via RNA Modulation

[0544] The RNA targeting protein may also be used, together with a suitable guide RNA, to target gene expression, via control of RNA processing. The control of RNA processing may include RNA processing reactions such as RNA splicing, including alternative splicing or specifically targeting certain splice variants or isoforms; viral replication (in particular of plant viruses, including virioids in plants and tRNA biosynthesis. The RNA targeting protein in combination with a suitable guide RNA may also be used to control RNA activation (RNAa). RNAa leads to the promotion of gene expression, so control of gene expression may be achieved that way through disruption or reduction of RNAa and thus less promotion of gene expression.

[0545] The RNA targeting effector protein of the invention can further be used for antiviral activity in plants, in particular against RNA viruses. The effector protein can be targeted to the viral RNA using a suitable guide RNA selective for a selected viral RNA sequence. In particular, the effector protein may be an active nuclease that cleaves RNA, such as single stranded RNA. Provided is therefore the use of an RNA targeting effector protein of the invention as an antiviral agent. Examples of viruses that can be counteracted in this way include, but are not limited to, Tobacco mosaic virus (TIV1V), Tomato spotted wilt virus (TSWV), Cucumber mosaic virus (CNIV), Potato virus Y (PVY), Cauliflower mosaic virus (CaMV) (RT virus), Plum pox virus (PPV), Brome mosaic virus (BMV) and Potato virus X (PVX).

[0546] Examples of modulating RNA expression in plants, algae or fungi, as an alternative of targeted gene modification are described herein further.

[0547] Of particular interest is the regulated control of gene expression through regulated cleavage of mRNA. This can be achieved by placing elements of the RNA targeting under the control of regulated promoters as described herein.

Use of the RNA Targeting CRISPR System to Restore the Functionality of tRNA Molecules.

[0548] Pring et al describe RNA editing in plant mitochondria and chloroplasts that alters mRNA sequences to code for different proteins than the DNA. (Plant Mol. Biol. (1993) 2.1 (6): 1163-1170. doi:10.1007/BF00023611). In particular embodiments of the invention, the elements of the RNA targeting CRISPR system specifically targeting mitochondrial and chloroplast mRNA can be introduced in a plant or plant cell to express different proteins in such plant cell organelles mimicking the processes occurring in vivo.

### Use of the RNA Targeting CRISPR System as an Alternative to RNA Interference to Inhibit RNA Expression.

[0549] The RNA targeting CRISPR system has uses similar to RNA inhibition or RNA interference, thus can also be substituted for such methods. In particular embodiment, the methods of the present invention include the use of the RNA targeting CRISPR as a substitute for e.g. an interfering ribonucleic acid (such as an siRNA or shRNA or a dsRNA). Examples of inhibition of RNA expression in plants, algae or fungi as an alternative of targeted gene modification are described herein further.

### Use of the RNA Targeting CRISPR System to Control RNA Interference.

[0550] Control over interfering RNA or miRNA may help reduce off-target effects (OTE) seen with those approaches by reducing the longevity of the interfering RNA or miRNA in vivo or in vitro. In particular embodiments, the target RNA may include interfering RNA, i.e. RNA involved in an RNA interference pathway, such as shRNA, siRNA and so forth. In other embodiments, the target RNA may include microRNA (miRNA) or double stranded RNA (dsRNA).

[0551] In other particular embodiments, if the RNA targeting protein and suitable guide RNA(s) are selectively expressed (for example spatially or temporally under the control of a regulated promoter, for example a tissue- or cell cycle-specific promoter and/or enhancer) this can be used to ‘protect’ the cells or systems (in vivo or in vitro) from RNAi in those cells. This may be useful in neighbouring tissues or cells where RNAi is not required or for the purposes of comparison of the cells or tissues where the effector protein and suitable guide are and are not expressed (i.e. where the RNAi is not controlled and where it is, respectively). The RNA targeting protein may be used to control or bind to molecules comprising or consisting of RNA, such as ribozymes, ribosomes or riboswitches. In embodiments of the invention, the guide RNA can recruit the RNA targeting protein to these molecules so that the RNA targeting protein is able to bind to them.

[0552] The RNA targeting CRISPR system of the invention can be applied in areas of in-planta RNAi technologies, without undue experimentation, from this disclosure, including insect pest management, plant disease management and management of herbicide resistance, as well as in plant assay and for other applications (see, for instance Kim et al., in Pesticide Biochemistry and Physiology (Impact Factor: 2.01). 01/2015; 120. DOI: 10.1016/j.pestbp.2015.01.002; Sharma et al. in Academic Journals (2015), Vol. 12(18) pp 2303-2312); Green J. M, in Pest Management Science, Vol 70(9), pp 1351-1357), because the present application provides the foundation for informed engineering of the system.

### Use of RNA Targeting CRISPR System to Modify Riboswitches and Control Metabolic Regulation in Plants, Algae and Fungi

[0553] Riboswitches (also known as aptozymes) are regulatory segments of messenger RNA that bind small molecules and in turn regulate gene expression. This mechanism allows the cell to sense the intracellular concentration of these small molecules. A particular riboswitch typically regulates its adjacent gene by altering the transcription, the translation or the splicing of this gene. Thus, in particular embodiments of the present invention, control of riboswitch activity is envisaged through the use of the RNA targeting protein in combination with a suitable guide RNA to target the riboswitch. This may be through cleavage of, or binding to, the riboswitch. In particular embodiments, reduction of riboswitch activity is envisaged. Recently, a riboswitch that binds thiamin pyrophosphate (TPP) was characterized and found to regulate thiamin biosynthesis in plants and algae. Furthermore it appears that this element is an essential regulator of primary metabolism in plants (Bocobza and Aharoni, Plant J. 2014 August; 79(4):693-703. doi: 10.1111/tpj.12540. Epub 2014 Jun. 17). TPP riboswitches are also found in certain fungi, such as in Neurospora crassa, where it controls alternative splicing to conditionally produce an Upstream Open Reading Frame (uORF), thereby affecting the expression of downstream genes (Cheah M T et al., (2007) Nature 447 (7143): 497-500. doi:10.1038/nature05769) The RNA targeting CRISPR system described herein may be used to manipulate the endogenous riboswitch activity in plants, algae or fungi and as such alter the expression of downstream genes controlled by it. In particular embodiments, the RNA targeting CRISP system may be used in assaying riboswitch function in vivo or in vitro and in studying its relevance for the metabolic network. In particular embodiments the RNA targeting CRISPR system may potentially be used for engineering of riboswitches as metabolite sensors in plants and platforms for gene control.

### Use of RNA Targeting CRISPR System in RNAi Screens for Plants, Algae or Fungi

[0554] Identifying gene products whose knockdown is associated with phenotypic changes, biological pathways can be interrogated and the constituent parts identified, via RNAi screens. In particular embodiments of the invention, control may also be exerted over or during these screens by use of the Guide 29 or Guide 30 protein and suitable guide RNA described herein to remove or reduce the activity of the RNAi in the screen and thus reinstate the activity of the (previously interfered with) gene product (by removing or reducing the interference/repression).

### Use of RNA Targeting Proteins for Visualization of RNA Molecules In Vivo and In Vitro

[0555] In particular embodiments, the invention provides a nucleic acid binding system. In situ hybridization of RNA with complementary probes is a powerful technique. Typically fluorescent DNA oligonucleotides are used to detect nucleic acids by hybridization. Increased efficiency has been attained by certain modifications, such as locked nucleic acids (LNAs), but there remains a need for efficient and versatile alternatives. As such, labelled elements of the RNA targeting system can be used as an alternative for efficient and adaptable system for in situ hybridization

### Further Applications of the RNA Targeting CRISPR System in Plants and Yeasts

### Use of RNA Targeting CRISPR System in Biofuel Production

[0556] The term “biofuel” as used herein is an alternative fuel made from plant and plant-derived resources. Renewable biofuels can be extracted from organic matter whose energy has been obtained through a process of carbon fixation or are made through the use or conversion of biomass. This biomass can be used directly for biofuels or can be converted to convenient energy containing substances by thermal conversion, chemical conversion, and biochemical conversion. This biomass conversion can result in fuel in solid, liquid, or gas form. There are two types of biofuels: bioethanol and biodiesel. Bioethanol is mainly produced by the sugar fermentation process of cellulose (starch), which is mostly derived from maize and sugar cane. Biodiesel on the other hand is mainly produced from oil crops such as rapeseed, palm, and soybean. Biofuels are used mainly for transportation.

### Enhancing Plant Properties for Biofuel Production

[0557] In particular embodiments, the methods using the RNA targeting CRISPR system as described herein are used to alter the properties of the cell wall in order to facilitate access by key hydrolysing agents for a more efficient release of sugars for fermentation. In particular embodiments, the biosynthesis of cellulose and/or lignin are modified. Cellulose is the major component of the cell wall. The biosynthesis of cellulose and lignin are co-regulated. By reducing the proportion of lignin in a plant the proportion of cellulose can be increased. In particular embodiments, the methods described herein are used to downregulate lignin biosynthesis in the plant so as to increase fermentable carbohydrates. More particularly, the methods described herein are used to downregulate at least a first lignin biosynthesis gene selected from the group consisting of 4-coumarate 3-hydroxylase (C3H), phenylalanine ammonia-lyase (PAL), cinnamate 4-hydroxylase (C4H), hydroxycinnamoyl transferase (HCT), caffeic acid O-methyltransferase (COMT), caffeoyl CoA 3-O-methyltransferase (CCoAOMT), ferulate 5-hydroxylase (F5H), cinnamyl alcohol dehydrogenase (CAD), cinnamoyl CoA-reductase (CCR), 4-coumarate-CoA ligase (4CL), monolignol-lignin-specific glycosyltransferase, and aldehyde dehydrogenase (ALDH) as disclosed in WO 2008064289 A2.

[0558] In particular embodiments, the methods described herein are used to produce plant mass that produces lower levels of acetic acid during fermentation (see also WO 2010096488).

### Modifying Yeast for Biofuel Production

[0559] In particular embodiments, the RNA targeting enzyme provided herein is used for bioethanol production by recombinant micro-organisms. For instance, RNA targeting enzymes can be used to engineer micro-organisms, such as yeast, to generate biofuel or biopolymers from fermentable sugars and optionally to be able to degrade plant-derived lignocellulose derived from agricultural waste as a source of fermentable sugars. More particularly, the invention provides methods whereby the RNA targeting CRISPR complex is used to modify the expression of endogenous genes required for biofuel production and/or to modify endogenous genes why may interfere with the biofuel synthesis. More particularly the methods involve stimulating the expression in a micro-organism such as a yeast of one or more nucleotide sequence encoding enzymes involved in the conversion of pyruvate to ethanol or another product of interest. In particular embodiments the methods ensure the stimulation of expression of one or more enzymes which allows the micro-organism to degrade cellulose, such as a cellulase. In yet further embodiments, the RNA targeting CRISPR complex is used to suppress endogenous metabolic pathways which compete with the biofuel production pathway.

### Modifying Algae and Plants for Production of Vegetable Oils or Biofuels

[0560] Transgenic algae or other plants such as rape may be particularly useful in the production of vegetable oils or biofuels such as alcohols (especially methanol and ethanol), for instance. These may be engineered to express or overexpress high levels of oil or alcohols for use in the oil or biofuel industries.

[0561] U.S. Pat. No. 8,945,839 describes a method for engineering Micro-Algae (Chlamydomonas reinhardtii cells) species) using Cas9. Using similar tools, the methods of the RNA targeting CRISPR system described herein can be applied on Chlamydomonas species and other algae. In particular embodiments, the RNA targeting effetor protein and guide RNA are introduced in algae expressed using a vector that expresses the RNA targeting effector protein under the control of a constitutive promoter such as Hsp70A-Rbc S2 or Beta2-tubulin. Guide RNA will be delivered using a vector containing T7 promoter. Alternatively, in vitro transcribed guide RNA can be delivered to algae cells. Electroporation protocol follows standard recommended protocol from the GeneArt Chlamydomonas Engineering kit.

### Particular Applications of the RNA Targeting Enzymes in Plants

[0562] In particular embodiments, present invention can be used as a therapy for virus removal in plant systems as it is able to cleave viral RNA. Previous studies in human systems have demonstrated the success of utilizing CRISPR in targeting the single strand RNA virus, hepatitis C (A. Price, et al., Proc. Natl. Acad. Sci, 2015). These methods may also be adapted for using the RNA targeting CRISPR system in plants.

### Improved Plants

[0563] The present invention also provides plants and yeast cells obtainable and obtained by the methods provided herein. The improved plants obtained by the methods described herein may be useful in food or feed production through the modified expression of genes which, for instance ensure tolerance to plant pests, herbicides, drought, low or high temperatures, excessive water, etc.

[0564] The improved plants obtained by the methods described herein, especially crops and algae may be useful in food or feed production through expression of, for instance, higher protein, carbohydrate, nutrient or vitamin levels than would normally be seen in the wildtype. In this regard, improved plants, especially pulses and tubers are preferred.

[0565] Improved algae or other plants such as rape may be particularly useful in the production of vegetable oils or biofuels such as alcohols (especially methanol and ethanol), for instance. These may be engineered to express or overexpress high levels of oil or alcohols for use in the oil or biofuel industries.

[0566] The invention also provides for improved parts of a plant. Plant parts include, but are not limited to, leaves, sterns, roots, tubers, seeds, endosperm, ovule, and pollen. Plant parts as envisaged herein may be viable, nonviable, regeneratable, and/or non-regeneratable.

[0567] It is also encompassed herein to provide plant cells and plants generated according to the methods of the invention. Gametes, seeds, embryos, either zygotic or somatic, progeny or hybrids of plants comprising the genetic modification, which are produced by traditional breeding methods, are also included within the scope of the present invention. Such plants may contain a heterologous or foreign DNA sequence inserted at or instead of a target sequence. Alternatively, such plants may contain only an alteration (mutation, deletion, insertion, substitution) in one or more nucleotides. As such, such plants will only be different from their progenitor plants by the presence of the particular modification.

[0568] In an embodiment of the invention, a Cas13c system is used to engineer pathogen resistant plants, for example by creating resistance against diseases caused by bacteria, fungi or viruses. In certain embodiments, pathogen resistance can be accomplished by engineering crops to produce a Cas13c system that wil be ingested by an insect pest, leading to mortality. In an embodiment of the invention, a Cas13c system is used to engineer abiotic stress tolerance. In another embodiment, a Cas13c system is used to engineer drought stress tolerance or salt stress tolerance, or cold or heat stress tolerance. Younis et al. 2014, Int. J. Biol. Sci. 10; 1150 reviewed potential targets of plant breeding methods, all of which are amenable to correction or improvement through use of a Cas13c system described herein. Some non-limiting target crops include Arabidops Zea mays is thaliana, Oryza sativa L, Prunus domestica L., Gossypium hirsutum, Nicotiana rustica, Zea mays, Medicago sativa, Nicotiana benthamiana and Arabidopsis thaliana

[0569] In an embodiment of the invention, a Cas13c system is used for management of crop pests. For example, a Cas13c system operable in a crop pest can be expressed from a plant host or transferred directly to the target, for example using a viral vector.

[0570] In an embodiment, the invention provides a method of efficiently producing homozygous organisms from a heterozygous non-human starting organism. In an embodiment, the invention is used in plant breeding. In another embodiment, the invention is used in animal breeding. In such embodiments, a homozygous organism such as a plant or animal is made by preventing or suppressing recombination by interfering with at least one target gene involved in double strand breaks, chromosome pairing and/or strand exchange.

### Application of the CAS13C Proteins in Optimized Functional RNA Targeting Systems

[0571] In an aspect the invention provides a system for specific delivery of functional components to the RNA environment. This can be ensured using the CRISPR systems comprising the RNA targeting effector proteins of the present invention which allow specific targeting of different components to RNA. More particularly such components include activators or repressors, such as activators or repressors of RNA translation, degradation, etc. Applications of this system are described elsewhere herein.

[0572] According to one aspect the invention provides non-naturally occurring or engineered composition comprising a guide RNA comprising a guide sequence capable of hybridizing to a target sequence in a genomic locus of interest in a cell, wherein the guide RNA is modified by the insertion of one or more distinct RNA sequence(s) that bind an adaptor protein. In particular embodiments, the RNA sequences may bind to two or more adaptor proteins (e.g. aptamers), and wherein each adaptor protein is associated with one or more functional domains. The guide RNAs of the Cas13c enzymes described herein are shown to be amenable to modification of the guide sequence. In particular embodiments, the guide RNA is modified by the insertion of distinct RNA sequence(s) 5′ of the direct repeat, within the direct repeat, or 3′ of the guide sequence. When there is more than one functional domain, the functional domains can be same or different, e.g., two of the same or two different activators or repressors. In an aspect the invention provides a herein-discussed composition, wherein the one or more functional domains are attached to the RNA targeting enzyme so that upon binding to the target RNA the functional domain is in a spatial orientation allowing for the functional domain to function in its attributed function; In an aspect the invention provides a herein-discussed composition, wherein the composition comprises a CRISPR-Cas complex having at least three functional domains, at least one of which is associated with the RNA targeting enzyme and at least two of which are associated with the gRNA.

[0573] Accordingly, in an aspect the invention provides non-naturally occurring or engineered CRISPR-Cas complex composition comprising the guide RNA as herein-discussed and a CRISPR enzyme which is an RNA targeting enzyme, wherein optionally the RNA targeting enzyme comprises at least one mutation, such that the RNA targeting enzyme has no more than 5% of the nuclease activity of the enzyme not having the at least one mutation, and optionally one or more comprising at least one or more nuclear localization sequences. In particular embodiments, the guide RNA is additionally or alternatively modified so as to still ensure binding of the RNA targeting enzyme but to prevent cleavage by the RNA targeting enzyme (as detailed elsewhere herein).

[0574] In particular embodiments, the RNA targeting enzyme is a Cas13c enzyme which has a diminished nuclease activity of at least 97%, or 100% as compared with the Cas13c enzyme not having the at least one mutation. In an aspect the invention provides a herein-discussed composition, wherein the Cas13c enzyme comprises two or more mutations. The mutations may be selected from mutations of one or more of the following amino acid residues: R597, H602, R1278, and H1283, such as for instance one or more of the following mutations: R597A, H602A, R1278A, and H1283A, according to Leptotrichia shahii Cas13c protein or a corresponding position in an ortholog.

[0575] In particular embodiments, an RNA targeting system is provided as described herein above comprising two or more functional domains. In particular embodiments, the two or more functional domains are heterologous functional domain. In particular embodiments, the system comprises an adaptor protein which is a fusion protein comprising a functional domain, the fusion protein optionally comprising a linker between the adaptor protein and the functional domain. In particular embodiments, the linker includes a GlySer linker. Additionally or alternatively, one or more functional domains are attached to the RNA effector protein by way of a linker, optionally a GlySer linker. In particular embodiments, the one or more functional domains are attached to the RNA targeting enzyme through one or both of the HEPN domains.

[0576] In an aspect the invention provides a herein-discussed composition, wherein the one or more functional domains associated with the adaptor protein or the RNA targeting enzume is a domain capable of activating or repressing RNA translation. In an aspect the invention provides a herein-discussed composition, wherein at least one of the one or more functional domains associated with the adaptor protein have one or more activities comprising methylase activity, demethylase activity, transcription activation activity, transcription repression activity, transcription release factor activity, histone modification activity, DNA integration activity RNA cleavage activity, DNA cleavage activity or nucleic acid binding activity, or molecular switch activity or chemical inducibility or light inducibility.

[0577] In an aspect the invention provides a herein-discussed composition comprising an aptamer sequence. In particular embodiments, the aptamer sequence is two or more aptamer sequences specific to the same adaptor protein. In an aspect the invention provides a herein-discussed composition, wherein the aptamer sequence is two or more aptamer sequences specific to different adaptor protein. In an aspect the invention provides a herein-discussed composition, wherein the adaptor protein comprises MS2, PP7, Qβ, F2, GA, fr, JP501, M12, R17, BZ13, JP34, JP500, KU1, M11, MX1, TW18, VK, SP, FI, ID2, NL95, TW19, AP205, ϕCb5, ϕCb8r, ϕCb12r, ϕCb23r, 7s, PRR1. Accordingly, in particular embodiments, the aptamer is selected from a binding protein specifically binding any one of the adaptor proteins listed above. In an aspect the invention provides a herein-discussed composition, wherein the cell is a eukaryotic cell. In an aspect the invention provides a herein-discussed composition, wherein the eukaryotic cell is a mammalian cell, a plant cell or a yeast cell, whereby the mammalian cell is optionally a mouse cell. In an aspect the invention provides a herein-discussed composition, wherein the mammalian cell is a human cell.

[0578] In an aspect the invention provides a herein above-discussed composition wherein there is more than one gRNA, and the gRNAs target different sequences whereby when the composition is employed, there is multiplexing. In an aspect the invention provides a composition wherein there is more than one gRNA modified by the insertion of distinct RNA sequence(s) that bind to one or more adaptor proteins.

[0579] In an aspect the invention provides a herein-discussed composition wherein one or more adaptor proteins associated with one or more functional domains is present and bound to the distinct RNA sequence(s) inserted into the guide RNA(s).

[0580] In an aspect the invention provides a herein-discussed composition wherein the guide RNA is modified to have at least one non-coding functional loop; e.g., wherein the at least one non-coding functional loop is repressive; for instance, wherein at least one non-coding functional loop comprises Alu.

[0581] In an aspect the invention provides a method for modifying gene expression comprising the administration to a host or expression in a host in vivo of one or more of the compositions as herein-discussed.

[0582] In an aspect the invention provides a herein-discussed method comprising the delivery of the composition or nucleic acid molecule(s) coding therefor, wherein said nucleic acid molecule(s) are operatively linked to regulatory sequence(s) and expressed in vivo. In an aspect the invention provides a herein-discussed method wherein the expression in vivo is via a lentivirus, an adenovirus, or an AAV.

[0583] In an aspect the invention provides a mammalian cell line of cells as herein-discussed, wherein the cell line is, optionally, a human cell line or a mouse cell line. In an aspect the invention provides a transgenic mammalian model, optionally a mouse, wherein the model has been transformed with a herein-discussed composition or is a progeny of said transformant.

[0584] In an aspect the invention provides a nucleic acid molecule(s) encoding guide RNA or the RNA targeting CRISPR-Cas complex or the composition as herein-discussed. In an aspect the invention provides a vector comprising: a nucleic acid molecule encoding a guide RNA (gRNA) comprising a guide sequence capable of hybridizing to a target sequence in a genomic locus of interest in a cell, wherein the direct repeat of the gRNA is modified by the insertion of distinct RNA sequence(s) that bind(s) to two or more adaptor proteins, and wherein each adaptor protein is associated with one or more functional domains; or, wherein the gRNA is modified to have at least one non-coding functional loop. In an aspect the invention provides vector(s) comprising nucleic acid molecule(s) encoding: non-naturally occurring or engineered CRISPR-Cas complex composition comprising the gRNA herein-discussed, and an RNA targeting enzyme, wherein optionally the RNA targeting enzyme comprises at least one mutation, such that the RNA targeting enzyme has no more than 5% of the nuclease activity of the RNA targeting enzyme not having the at least one mutation, and optionally one or more comprising at least one or more nuclear localization sequences. In an aspect a vector can further comprise regulatory element(s) operable in a eukaryotic cell operably linked to the nucleic acid molecule encoding the guide RNA (gRNA) and/or the nucleic acid molecule encoding the RNA targeting enzyme and/or the optional nuclear localization sequence(s).

[0585] In one aspect, the invention provides a kit comprising one or more of the components described hereinabove. In some embodiments, the kit comprises a vector system as described above and instructions for using the kit.

[0586] In an aspect the invention provides a method of screening for gain of function (GOF) or loss of function (LOF) or for screening non-coding RNAs or potential regulatory regions (e.g. enhancers, repressors) comprising the cell line of as herein-discussed or cells of the model herein-discussed containing or expressing the RNA targeting enzyme and introducing a composition as herein-discussed into cells of the cell line or model, whereby the gRNA includes either an activator or a repressor, and monitoring for GOF or LOF respectively as to those cells as to which the introduced gRNA includes an activator or as to those cells as to which the introduced gRNA includes a repressor.

[0587] In an aspect the invention provides a library of non-naturally occurring or engineered compositions, each comprising a RNA targeting CRISPR guide RNA (gRNA) comprising a guide sequence capable of hybridizing to a target RNA sequence of interest in a cell, an RNA targeting enzyme, wherein the RNA targeting enzyme comprises at least one mutation, such that the RNA targeting enzyme has no more than 5% of the nuclease activity of the RNA targeting enzyme not having the at least one mutation, wherein the gRNA is modified by the insertion of distinct RNA sequence(s) that bind to one or more adaptor proteins, and wherein the adaptor protein is associated with one or more functional domains, wherein the composition comprises one or more or two or more adaptor proteins, wherein the each protein is associated with one or more functional domains, and wherein the gRNAs comprise a genome wide library comprising a plurality of RNA targeting guide RNAs (gRNAs). In an aspect the invention provides a library as herein-discussed, wherein the RNA targeting RNA targeting enzyme has a diminished nuclease activity of at least 97%, or 100% as compare with the RNA targeting enzyme not having the at least one mutation. In an aspect the invention provides a library as herein-discussed, wherein the adaptor protein is a fusion protein comprising the functional domain. In an aspect the invention provides a library as herein discussed, wherein the gRNA is not modified by the insertion of distinct RNA sequence(s) that bind to the one or two or more adaptor proteins. In an aspect the invention provides a library as herein discussed, wherein the one or two or more functional domains are associated with the RNA targeting enzyme. In an aspect the invention provides a library as herein discussed, wherein the cell population of cells is a population of eukaryotic cells. In an aspect the invention provides a library as herein discussed, wherein the eukaryotic cell is a mammalian cell, a plant cell or a yeast cell. In an aspect the invention provides a library as herein discussed, wherein the mammalian cell is a human cell. In an aspect the invention provides a library as herein discussed, wherein the population of cells is a population of embryonic stem (ES) cells.

[0588] In an aspect the invention provides a library as herein discussed, wherein the targeting is of about 100 or more RNA sequences. In an aspect the invention provides a library as herein discussed, wherein the targeting is of about 1000 or more RNA sequences. In an aspect the invention provides a library as herein discussed, wherein the targeting is of about 20,000 or more sequences. In an aspect the invention provides a library as herein discussed, wherein the targeting is of the entire transcriptome. In an aspect the invention provides a library as herein discussed, wherein the targeting is of a panel of target sequences focused on a relevant or desirable pathway. In an aspect the invention provides a library as herein discussed, wherein the pathway is an immune pathway. In an aspect the invention provides a library as herein discussed, wherein the pathway is a cell division pathway.

[0589] In one aspect, the invention provides a method of generating a model eukaryotic cell comprising a gene with modified expression. In some embodiments, a disease gene is any gene associated an increase in the risk of having or developing a disease. In some embodiments, the method comprises (a) introducing one or more vectors encoding the components of the system described herein above into a eukaryotic cell, and (b) allowing a CRISPR complex to bind to a target polynucleotide so as to modify expression of a gene, thereby generating a model eukaryotic cell comprising modified gene expression.

[0590] The structural information provided herein allows for interrogation of guide RNA interaction with the target RNA and the RNA targeting enzyme permitting engineering or alteration of guide RNA structure to optimize functionality of the entire RNA targeting CRISPR-Cas system. For example, the guide RNA may be extended, without colliding with the RNA targeting protein by the insertion of adaptor proteins that can bind to RNA. These adaptor proteins can further recruit effector proteins or fusions which comprise one or more functional domains.

[0591] An aspect of the invention is that the above elements are comprised in a single composition or comprised in individual compositions. These compositions may advantageously be applied to a host to elicit a functional effect on the genomic level.

[0592] The skilled person will understand that modifications to the guide RNA which allow for binding of the adapter+functional domain but not proper positioning of the adapter+functional domain (e.g. due to steric hindrance within the three dimensial structure of the CRISPR complex) are modifications which are not intended. The one or more modified guide RNA may be modified, by introduction of a distinct RNA sequence(s) 5′ of the direct repeat, within the direct repeat, or 3′ of the guide sequence.

[0593] The modified guide RNA, the inactivated RNA targeting enzyme (with or without functional domains), and the binding protein with one or more functional domains, may each individually be comprised in a composition and administered to a host individually or collectively. Alternatively, these components may be provided in a single composition for administration to a host. Administration to a host may be performed via viral vectors known to the skilled person or described herein for delivery to a host (e.g. lentiviral vector, adenoviral vector, AAV vector). As explained herein, use of different selection markers (e.g. for lentiviral gRNA selection) and concentration of gRNA (e.g. dependent on whether multiple gRNAs are used) may be advantageous for eliciting an improved effect.

[0594] Using the provided compositions, the person skilled in the art can advantageously and specifically target single or multiple loci with the same or different functional domains to elicit one or more genomic events. The compositions may be applied in a wide variety of methods for screening in libraries in cells and functional modeling in vivo (e.g. gene activation of lincRNA and indentification of function; gain-of-function modeling; loss-of-function modeling; the use the compositions of the invention to establish cell lines and transgenic animals for optimization and screening purposes).

[0595] The current invention comprehends the use of the compositions of the current invention to establish and utilize conditional or inducible CRISPR RNA targeting events. (See, e.g., Platt et al., Cell (2014), dx.doi.org/10.1016/j.cell.2014.09.014, or PCT patent publications cited herein, such as WO 2014/093622 (PCT/US2013/074667), which are not believed prior to the present invention or application). For example, the target cell comprises RNA targeting CRISRP enzyme conditionally or inducibly (e.g. in the form of Cre dependent constructs) and/or the adapter protein conditionally or inducibly and, on expression of a vector introduced into the target cell, the vector expresses that which induces or gives rise to the condition of s RNA targeting enzyme expression and/or adaptor expression in the target cell. By applying the teaching and compositions of the current invention with the known method of creating a CRISPR complex, inducible gene expression affected by functional domains are also an aspect of the current invention. Alternatively, the adaptor protein may be provided as a conditional or inducible element with a conditional or inducible s RNA targeting enzyme to provide an effective model for screening purposes, which advantageously only requires minimal design and administration of specific gRNAs for a broad number of applications.

### Guide RNA According to the Invention Comprising a Dead Guide Sequence

[0596] In one aspect, the invention provides guide sequences which are modified in a manner which allows for formation of the CRISPR complex and successful binding to the target, while at the same time, not allowing for successful nuclease activity (i.e. without nuclease activity/without indel activity). For matters of explanation such modified guide sequences are referred to as “dead guides” or “dead guide sequences”. These dead guides or dead guide sequences can be thought of as catalytically inactive or conformationally inactive with regard to nuclease activity. Indeed, dead guide sequences may not sufficiently engage in productive base pairing with respect to the ability to promote catalytic activity or to distinguish on-target and off-target binding activity. Briefly, the assay involves synthesizing a CRISPR target RNA and guide RNAs comprising mismatches with the target RNA, combining these with the RNA targeting enzyme and analyzing cleavage based on gels based on the presence of bands generated by cleavage products, and quantifying cleavage based upon relative band intensities.

[0597] Hence, in a related aspect, the invention provides a non-naturally occurring or engineered composition RNA targeting CRISPR-Cas system comprising a functional RNA targeting as described herein, and guide RNA (gRNA) wherein the gRNA comprises a dead guide sequence whereby the gRNA is capable of hybridizing to a target sequence such that the RNA targeting CRISPR-Cas system is directed to a genomic locus of interest in a cell without detectable RNA cleavage activity of a non-mutant RNA targeting enzyme of the system. It is to be understood that any of the gRNAs according to the invention as described herein elsewhere may be used as dead gRNAs/gRNAs comprising a dead guide sequence as described herein below. Any of the methods, products, compositions and uses as described herein elsewhere is equally applicable with the dead gRNAs/gRNAs comprising a dead guide sequence as further detailed below. By means of further guidance, the following particular aspects and embodiments are provided.

[0598] The ability of a dead guide sequence to direct sequence-specific binding of a CRISPR complex to an RNA target sequence may be assessed by any suitable assay. For example, the components of a CRISPR system sufficient to form a CRISPR complex, including the dead guide sequence to be tested, may be provided to a host cell having the corresponding target sequence, such as by transfection with vectors encoding the components of the CRISPR sequence, followed by an assessment of preferential cleavage within the target sequence. For instance, cleavage of a target RNA polynucleotide sequence may be evaluated in a test tube by providing the target sequence, components of a CRISPR complex, including the dead guide sequence to be tested and a control guide sequence different from the test dead guide sequence, and comparing binding or rate of cleavage at the target sequence between the test and control guide sequence reactions. Other assays are possible, and will occur to those skilled in the art. A dead guide sequence may be selected to target any target sequence. In some embodiments, the target sequence is a sequence within a genome of a cell.

[0599] As explained further herein, several structural parameters allow for a proper framework to arrive at such dead guides. Dead guide sequences are typically shorter than respective guide sequences which result in active RNA cleavage. In particular embodiments, dead guides are 5%, 10%, 20%, 30%, 40%, 50%, shorter than respective guides directed to the same.

[0600] As explained below and known in the art, one aspect of gRNA-RNA targeting specificity is the direct repeat sequence, which is to be appropriately linked to such guides. In particular, this implies that the direct repeat sequences are designed dependent on the origin of the RNA targeting enzyme. Thus, structural data available for validated dead guide sequences may be used for designing Cas13c specific equivalents. Structural similarity between, e.g., the orthologous nuclease domains HEPN of two or more Cas13c effector proteins may be used to transfer design equivalent dead guides. Thus, the dead guide herein may be appropriately modified in length and sequence to reflect such Cas13c specific equivalents, allowing for formation of the CRISPR complex and successful binding to the target RNA, while at the same time, not allowing for successful nuclease activity.

[0601] The use of dead guides in the context herein as well as the state of the art provides a surprising and unexpected platform for network biology and/or systems biology in both in vitro, ex vivo, and in vivo applications, allowing for multiplex gene targeting, and in particular bidirectional multiplex gene targeting. Prior to the use of dead guides, addressing multiple targets has been challenging and in some cases not possible. With the use of dead guides, multiple targets, and thus multiple activities, may be addressed, for example, in the same cell, in the same animal, or in the same patient. Such multiplexing may occur at the same time or staggered for a desired timeframe.

[0602] For example, the dead guides allow to use gRNA as a means for gene targeting, without the consequence of nuclease activity, while at the same time providing directed means for activation or repression. Guide RNA comprising a dead guide may be modified to further include elements in a manner which allow for activation or repression of gene activity, in particular protein adaptors (e.g. aptamers) as described herein elsewhere allowing for functional placement of gene effectors (e.g. activators or repressors of gene activity). One example is the incorporation of aptamers, as explained herein and in the state of the art. By engineering the gRNA comprising a dead guide to incorporate protein-interacting aptamers (Konermann et al., “Genome-scale transcription activation by an engineered CRISPR-Cas9 complex,” doi:10.1038/nature14136, incorporated herein by reference), one may assemble multiple distinct effector domains. Such may be modeled after natural processes.

[0603] Thus, one aspect is a gRNA of the invention which comprises a dead guide, wherein the gRNA further comprises modifications which provide for gene activation or repression, as described herein. The dead gRNA may comprise one or more aptamers. The aptamers may be specific to gene effectors, gene activators or gene repressors. Alternatively, the aptamers may be specific to a protein which in turn is specific to and recruits/binds a specific gene effector, gene activator or gene repressor. If there are multiple sites for activator or repressor recruitment, it is preferred that the sites are specific to either activators or repressors. If there are multiple sites for activator or repressor binding, the sites may be specific to the same activators or same repressors. The sites may also be specific to different activators or different repressors. The effectors, activators, repressors may be present in the form of fusion proteins.

[0604] In an aspect, the invention provides a method of selecting a dead guide RNA targeting sequence for directing a functionalized CRISPR system to a gene locus in an organism, which comprises: a) locating one or more CRISPR motifs in the gene locus; b) analyzing the 20 nt sequence downstream of each CRISPR motif by: i) determining the GC content of the sequence; and ii) determining whether there are off-target matches of the first 15 nt of the sequence in the genome of the organism; c) selecting the sequence for use in a guide RNA if the GC content of the sequence is 70% or less and no off-target matches are identified. In an embodiment, the sequence is selected if the GC content is 50% or less. In an embodiment, the sequence is selected if the GC content is 40% or less. In an embodiment, the sequence is selected if the GC content is 30% or less. In an embodiment, two or more sequences are analyzed and the sequence having the lowest GC content is selected. In an embodiment, off-target matches are determined in regulatory sequences of the organism. In an embodiment, the gene locus is a regulatory region. An aspect provides a dead guide RNA comprising the targeting sequence selected according to the aforementioned methods.

[0605] In an aspect, the invention provides a dead guide RNA for targeting a functionalized CRISPR system to a gene locus in an organism. In an embodiment of the invention, the dead guide RNA comprises a targeting sequence wherein the CG content of the target sequence is 70% or less, and the first 15 nt of the targeting sequence does not match an off-target sequence downstream from a CRISPR motif in the regulatory sequence of another gene locus in the organism. In certain embodiments, the GC content of the targeting sequence 60% or less, 55% or less, 50% or less, 45% or less, 40% or less, 35% or less or 30% or less. In certain embodiments, the GC content of the targeting sequence is from 70% to 60% or from 60% to 50% or from 50% to 40% or from 40% to 30%. In an embodiment, the targeting sequence has the lowest CG content among potential targeting sequences of the locus.

[0606] In an embodiment of the invention, the first 15 nt of the dead guide match the target sequence. In another embodiment, first 14 nt of the dead guide match the target sequence. In another embodiment, the first 13 nt of the dead guide match the target sequence. In another embodiment first 12 nt of the dead guide match the target sequence. In another embodiment, first 11 nt of the dead guide match the target sequence. In another embodiment, the first 10 nt of the dead guide match the target sequence. In an embodiment of the invention the first 15 nt of the dead guide does not match an off-target sequence downstream from a CRISPR motif in the regulatory region of another gene locus. In other embodiments, the first 14 nt, or the first 13 nt of the dead guide, or the first 12 nt of the guide, or the first 11 nt of the dead guide, or the first 10 nt of the dead guide, does not match an off-target sequence downstream from a CRISPR motif in the regulatory region of another gene locus. In other embodiments, the first 15 nt, or 14 nt, or 13 nt, or 12 nt, or 11 nt of the dead guide do not match an off-target sequence downstream from a CRISPR motif in the genome.

[0607] In certain embodiments, the dead guide RNA includes additional nucleotides at the 3′-end that do not match the target sequence. Thus, a dead guide RNA that includes the first 20-28 nt, downstream of a CRISPR motif can be extended in length at the 3′ end.

### General Provisions

[0608] In an aspect, the invention provides a nucleic acid binding system. In situ hybridization of RNA with complementary probes is a powerful technique. Typically fluorescent DNA oligonucleotides are used to detect nucleic acids by hybridization. Increased efficiency has been attained by certain modifications, such as locked nucleic acids (LNAs), but there remains a need for efficient and versatile alternatives. The invention provides an efficient and adaptable system for in situ hybridization.

[0609] In embodiments of the invention the terms guide sequence and guide RNA are used interchangeably as in foregoing cited documents such as WO 2014/093622 (PCT/US2013/074667). In general, a guide sequence is any polynucleotide sequence having sufficient complementarity with a target polynucleotide sequence to hybridize with the target sequence and direct sequence-specific binding of a CRISPR complex to the target sequence. In some embodiments, the degree of complementarity between a guide sequence and its corresponding target sequence, when optimally aligned using a suitable alignment algorithm, is about or more than about 50%, 60%, 75%, 80%, 85%, 90%, 95%, 97.5%, 99%, or more. Optimal alignment may be determined with the use of any suitable algorithm for aligning sequences, non-limiting example of which include the Smith-Waterman algorithm, the Needleman-Wunsch algorithm, algorithms based on the Burrows-Wheeler Transform (e.g., the Burrows Wheeler Aligner), ClustalW, Clustal X, BLAT, Novoalign (Novocraft Technologies; available at www.novocraft.com), ELAND (Illumina, San Diego, Calif.), SOAP (available at soap.genomics.org.cn), and Maq (available at maq.sourceforge.net). In some embodiments, a guide sequence is about or more than about 5, 10, 11, 12, 13, 14, 15, 16, 17, 18, 19, 20, 21, 22, 23, 24, 25, 26, 27, 28, 29, 30, 35, 40, 45, 50, 75, or more nucleotides in length. In some embodiments, a guide sequence is less than about 75, 50, 45, 40, 35, 30, 25, 20, 15, 12, or fewer nucleotides in length. Preferably the guide sequence is 10-30 nucleotides long. The ability of a guide sequence to direct sequence-specific binding of a CRISPR complex to a target sequence may be assessed by any suitable assay. For example, the components of a CRISPR system sufficient to form a CRISPR complex, including the guide sequence to be tested, may be provided to a host cell having the corresponding target sequence, such as by transfection with vectors encoding the components of the CRISPR sequence, followed by an assessment of preferential cleavage within the target sequence, such as by Surveyor assay as described herein. Similarly, cleavage of a target polynucleotide sequence may be evaluated in a test tube by providing the target sequence, components of a CRISPR complex, including the guide sequence to be tested and a control guide sequence different from the test guide sequence, and comparing binding or rate of cleavage at the target sequence between the test and control guide sequence reactions. Other assays are possible, and will occur to those skilled in the art. A guide sequence may be selected to target any target sequence. In some embodiments, the target sequence is a sequence within a genome of a cell. Exemplary target sequences include those that are unique in the target genome.

[0610] In general, and throughout this specification, the term “vector” refers to a nucleic acid molecule capable of transporting another nucleic acid to which it has been linked. Vectors include, but are not limited to, nucleic acid molecules that are single-stranded, double-stranded, or partially double-stranded; nucleic acid molecules that comprise one or more free ends, no free ends (e.g., circular); nucleic acid molecules that comprise DNA, RNA, or both; and other varieties of polynucleotides known in the art. One type of vector is a “plasmid,” which refers to a circular double stranded DNA loop into which additional DNA segments can be inserted, such as by standard molecular cloning techniques. Another type of vector is a viral vector, wherein virally-derived DNA or RNA sequences are present in the vector for packaging into a virus (e.g., retroviruses, replication defective retroviruses, adenoviruses, replication defective adenoviruses, and adeno-associated viruses). Viral vectors also include polynucleotides carried by a virus for transfection into a host cell. Certain vectors are capable of autonomous replication in a host cell into which they are introduced (e.g., bacterial vectors having a bacterial origin of replication and episomal mammalian vectors). Other vectors (e.g., non-episomal mammalian vectors) are integrated into the genome of a host cell upon introduction into the host cell, and thereby are replicated along with the host genome. Moreover, certain vectors are capable of directing the expression of genes to which they are operatively-linked. Such vectors are referred to herein as “expression vectors.” Vectors for and that result in expression in a eukaryotic cell can be referred to herein as “eukaryotic expression vectors.” Common expression vectors of utility in recombinant DNA techniques are often in the form of plasmids.

[0611] Recombinant expression vectors can comprise a nucleic acid of the invention in a form suitable for expression of the nucleic acid in a host cell, which means that the recombinant expression vectors include one or more regulatory elements, which may be selected on the basis of the host cells to be used for expression, that is operatively-linked to the nucleic acid sequence to be expressed. Within a recombinant expression vector, “operably linked” is intended to mean that the nucleotide sequence of interest is linked to the regulatory element(s) in a manner that allows for expression of the nucleotide sequence (e.g., in an in vitro transcription/translation system or in a host cell when the vector is introduced into the host cell).

[0612] The term “regulatory element” is intended to include promoters, enhancers, internal ribosomal entry sites (IRES), and other expression control elements (e.g., transcription termination signals, such as polyadenylation signals and poly-U sequences). Such regulatory elements are described, for example, in Goeddel, GENE EXPRESSION TECHNOLOGY: METHODS IN ENZYMOLOGY 185, Academic Press, San Diego, Calif. (1990). Regulatory elements include those that direct constitutive expression of a nucleotide sequence in many types of host cell and those that direct expression of the nucleotide sequence only in certain host cells (e.g., tissue-specific regulatory sequences). A tissue-specific promoter may direct expression primarily in a desired tissue of interest, such as muscle, neuron, bone, skin, blood, specific organs (e.g., liver, pancreas), or particular cell types (e.g., lymphocytes). Regulatory elements may also direct expression in a temporal-dependent manner, such as in a cell-cycle dependent or developmental stage-dependent manner, which may or may not also be tissue or cell-type specific. In some embodiments, a vector comprises one or more pol III promoter (e.g., 1, 2, 3, 4, 5, or more pol III promoters), one or more pol II promoters (e.g., 1, 2, 3, 4, 5, or more pol II promoters), one or more pol I promoters (e.g., 1, 2, 3, 4, 5, or more pol I promoters), or combinations thereof. Examples of pol III promoters include, but are not limited to, U6 and H1 promoters. Examples of pol II promoters include, but are not limited to, the retroviral Rous sarcoma virus (RSV) LTR promoter (optionally with the RSV enhancer), the cytomegalovirus (CMV) promoter (optionally with the CMV enhancer) [see, e.g., Boshart et al, Cell, 41:521-530 (1985)], the SV40 promoter, the dihydrofolate reductase promoter, the β-actin promoter, the phosphoglycerol kinase (PGK) promoter, and the EF1α promoter. Also encompassed by the term “regulatory element” are enhancer elements, such as WPRE; CMV enhancers; the R-U5′ segment in LTR of HTLV-I (Mol. Cell. Biol., Vol. 8(1), p. 466-472, 1988); SV40 enhancer; and the intron sequence between exons 2 and 3 of rabbit β-globin (Proc. Natl. Acad. Sci. USA., Vol. 78(3), p. 1527-31, 1981). It will be appreciated by those skilled in the art that the design of the expression vector can depend on such factors as the choice of the host cell to be transformed, the level of expression desired, etc. A vector can be introduced into host cells to thereby produce transcripts, proteins, or peptides, including fusion proteins or peptides, encoded by nucleic acids as described herein (e.g., clustered regularly interspersed short palindromic repeats (CRISPR) transcripts, proteins, enzymes, mutant forms thereof, fusion proteins thereof, etc.).

[0613] Advantageous vectors include lentiviruses and adeno-associated viruses, and types of such vectors can also be selected for targeting particular types of cells.

[0614] As used herein, the term “crRNA” or “guide RNA” or “single guide RNA” or “sgRNA” or “one or more nucleic acid components” of a Type V or Type VI CRISPR-Cas locus effector protein comprises any polynucleotide sequence having sufficient complementarity with a target nucleic acid sequence to hybridize with the target nucleic acid sequence and direct sequence-specific binding of a nucleic acid-targeting complex to the target nucleic acid sequence.

[0615] In certain embodiments, the CRISPR system as provided herein can make use of a crRNA or analogous polynucleotide comprising a guide sequence, wherein the polynucleotide is an RNA, a DNA or a mixture of RNA and DNA, and/or wherein the polynucleotide comprises one or more nucleotide analogs. The sequence can comprise any structure, including but not limited to a structure of a native crRNA, such as a bulge, a hairpin or a stem loop structure. In certain embodiments, the polynucleotide comprising the guide sequence forms a duplex with a second polynucleotide sequence which can be an RNA or a DNA sequence.

[0616] In certain embodiments, guides of the invention comprise non-naturally occurring nucleic acids and/or non-naturally occurring nucleotides and/or nucleotide analogs, and/or chemically modifications. Non-naturally occurring nucleic acids can include, for example, mixtures of naturally and non-naturally occurring nucleotides. Non-naturally occurring nucleotides and/or nucleotide analogs may be modified at the ribose, phosphate, and/or base moiety. In an embodiment of the invention, a guide nucleic acid comprises ribonucleotides and non-ribonucleotides. In one such embodiment, a guide comprises one or more ribonucleotides and one or more deoxyribonucleotides. In an embodiment of the invention, the guide comprises one or more non-naturally occurring nucleotide or nucleotide analog such as a nucleotide with phosphorothioate linkage, boranophosphate linkage, a locked nucleic acid (LNA) nucleotides comprising a methylene bridge between the 2′ and 4′ carbons of the ribose ring, or bridged nucleic acids (BNA). Other examples of modified nucleotides include 2′-O-methyl analogs, 2′-deoxy analogs, 2-thiouridine analogs, N6-methyladenosine analogs, or 2′-fluoro analogs. Further examples of modified bases include, but are not limited to, 2-aminopurine, 5-bromo-uridine, pseudouridine (Ψ), N¹-methylpseudouridine (me¹Ψ), 5-methoxyuridine (5moU), inosine, 7-methylguanosine. Examples of guide RNA chemical modifications include, without limitation, incorporation of 2′-O-methyl (M), 2′-O-methyl 3′phosphorothioate (MS), S-constrained ethyl (cEt), or 2′-O-methyl 3′thioPACE (MSP) at one or more terminal nucleotides. Such chemically modified guide RNAs can comprise increased stability and increased activity as compared to unmodified guide RNAs, though on-target vs. off-target specificity is not predictable. (See, Hendel, 2015, Nat Biotechnol. 33(9):985-9, doi: 10.1038/nbt.3290, published online 29 Jun. 2015; Allerson et al., J. Med. Chem. 2005, 48:901-904; Bramsen et al., Front. Genet., 2012, 3:154; Deng et al., PNAS, 2015, 112:11870-11875; Sharma et al., MedChemComm., 2014, 5:1454-1471; Li et al., Nature Biomedical Engineering, 2017, 1, 0066 DOI:10.1038/s41551-017-0066). In some embodiments, the 5′ and/or 3′ end of a guide RNA is modified by a variety of functional moieties including fluorescent dyes, polyethylene glycol, cholesterol, proteins, or detection tags. (See Kelly et al., 2016, J. Biotech. 233:74-83). In certain embodiments, a guide comprises ribonucleotides in a region that binds to a target DNA and one or more deoxyribonucleotides and/or nucleotide analogs in a region that binds to Cas9, Cpf1, or C2c1. In an embodiment of the invention, deoxyribonucleotides and/or nucleotide analogs are incorporated in engineered guide structures, such as, without limitation, 5′ and/or 3′ end, stem-loop regions, and the seed region. In certain embodiments, the modification is not in the 5′-handle of the stem-loop regions. Chemical modification in the 5′-handle of the stem-loop region of a guide may abolish its function (see Li, et al., Nature Biomedical Engineering, 2017, 1:0066). In certain embodiments, at least 1, 2, 3, 4, 5, 6, 7, 8, 9, 10, 11, 12, 13, 14, 15, 16, 17, 18, 19, 20, 21, 22, 23, 24, 25, 26, 27, 28, 29, 30, 35, 40, 45, 50, or 75 nucleotides of a guide is chemically modified. In some embodiments, 3-5 nucleotides at either the 3′ or the 5′ end of a guide is chemically modified. In some embodiments, only minor modifications are introduced in the seed region, such as 2′-F modifications. In some embodiments, 2′-F modification is introduced at the 3′ end of a guide. In certain embodiments, three to five nucleotides at the 5′ and/or the 3′ end of the guide are chemicially modified with 2′-O-methyl (M), 2′-O-methyl-3′-phosphorothioate (MS), S-constrained ethyl(cEt), or 2′-O-methyl-3′-thioPACE (MSP). Such modification can enhance genome editing efficiency (see Hendel et al., Nat. Biotechnol. (2015) 33(9): 985-989). In certain embodiments, all of the phosphodiester bonds of a guide are substituted with phosphorothioates (PS) for enhancing levels of gene disruption. In certain embodiments, more than five nucleotides at the 5′ and/or the 3′ end of the guide are chemicially modified with 2′-O-Me, 2′-F or S-constrained ethyl(cEt). Such chemically modified guide can mediate enhanced levels of gene disruption (see Ragdarm et al., 0215, PNAS, E7110-E7111). In an embodiment of the invention, a guide is modified to comprise a chemical moiety at its 3′ and/or 5′ end. Such moieties include, but are not limited to amine, azide, alkyne, thio, dibenzocyclooctyne (DBCO), or Rhodamine. In certain embodiment, the chemical moiety is conjugated to the guide by a linker, such as an alkyl chain. In certain embodiments, the chemical moiety of the modified guide can be used to attach the guide to another molecule, such as DNA, RNA, protein, or nanoparticles. Such chemically modified guide can be used to identify or enrich cells generically edited by a CRISPR system (see Lee et al., eLife, 2017, 6:e25312, DOI:10.7554)

[0617] In one aspect of the invention, the guide comprises a modified crRNA for Cpf1, having a 5′-handle and a guide segment further comprising a seed region and a 3′-terminus. In some embodiments, the modified guide can be used with a Cpf1 of any one of Acidaminococcus sp. BV3L6 Cpf1 (AsCpf1); Francisella tularensis subsp. Novicida U112 Cpf1 (FnCpf1); L. bacterium MC2017 Cpf1 (Lb3Cpf1); Butyrivibrio proteoclasticus Cpf1 (BpCpf1); Parcubacteria bacterium GWC2011_GWC_2_44_17 Cpf1 (PbCpf1); Peregrinibacteria bacterium GW2011_GWA_33_10 Cpf1 (PeCpf1); Leptospira inadai Cpf1 (LiCpf1); Smithella sp. SC K08D17 Cpf1 (SsCpf1); L. bacterium MA2020 Cpf1 (Lb2Cpf1); Porphyromonas crevioricanis Cpf1 (PcCpf1); Porphyromonas macacae Cpf1 (PmCpf1); Candidatus Methanoplasma termitum Cpf1 (CMtCpf1); Eubacterium eligens Cpf1 (EeCpf1); Moraxella bovoculi 237 Cpf1 (MbCpf1); Prevotella disiens Cpf1 (PdCpf1); or L. bacterium ND2006 Cpf1 (LbCpf1).

[0618] In some embodiments, the modification to the guide is a chemical modification, an insertion, a deletion or a split. In some embodiments, the chemical modification includes, but is not limited to, incorporation of 2′-O-methyl (M) analogs, 2′-deoxy analogs, 2-thiouridine analogs, N6-methyladenosine analogs, 2′-fluoro analogs, 2-aminopurine, 5-bromo-uridine, pseudouridine (Ψ), N¹-methylpseudouridine (me¹Ψ), 5-methoxyuridine (5moU), inosine, 7-methylguanosine, 2′-O-methyl-3′-phosphorothioate (MS), S-constrained ethyl(cEt), phosphorothioate (PS), or 2′-O-methyl-3′-thioPACE (MSP). In some embodiments, the guide comprises one or more of phosphorothioate modifications. In certain embodiments, at least 1, 2, 3, 4, 5, 6, 7, 8, 9, 10, 11, 12, 13, 14, 15, 16, 17, 18, 19, 20, or 25 nucleotides of the guide are chemically modified. In certain embodiments, one or more nucleotides in the seed region are chemically modified. In certain embodiments, one or more nucleotides in the 3′-terminus are chemically modified. In certain embodiments, none of the nucleotides in the 5′-handle is chemically modified. In some embodiments, the chemical modification in the seed region is a minor modification, such as incorporation of a 2′-fluoro analog. In a specific embodiment, one nucleotide of the seed region is replaced with a 2′-fluoro analog. In some embodiments, 5 or 10 nucleotides in the 3′-terminus are chemically modified. Such chemical modifications at the 3′-terminus of the Cpf1 CrRNA improve gene cutting efficiency (see Li, et al., Nature Biomedical Engineering, 2017, 1:0066). In a specific embodiment, 5 nucleotides in the 3′-terminus are replaced with 2′-fluoro analogues. In a specific embodiment, 10 nucleotides in the 3′-terminus are replaced with 2′-fluoro analogues. In a specific embodiment, 5 nucleotides in the 3′-terminus are replaced with 2′-O-methyl (M) analogs.

[0619] In some embodiments, the loop of the 5′-handle of the guide is modified. In some embodiments, the loop of the 5′-handle of the guide is modified to have a deletion, an insertion, a split, or chemical modifications. In certain embodiments, the loop comprises 3, 4, or 5 nucleotides. In certain embodiments, the loop comprises the sequence of UCUU, UUUU, UAUU, or UGUU.

[0620] In one aspect, the guide comprises portions that are chemically linked or conjugated via a non-phosphodiester bond. In one aspect, the guide comprises, in non-limiting examples, a tracr sequence and a tracr mate sequence portion or a direct repeat and a targeting sequence portion that are chemically linked or conjugated via a non-nucleotide loop. In some embodiments, the portions are joined via a non-phosphodiester covalent linker. Examples of the covalent linker include but are not limited to a chemical moiety selected from the group consisting of carbamates, ethers, esters, amides, imines, amidines, aminotrizines, hydrozone, disulfides, thioethers, thioesters, phosphorothioates, phosphorodithioates, sulfonamides, sulfonates, fulfones, sulfoxides, ureas, thioureas, hydrazide, oxime, triazole, photolabile linkages, C—C bond forming groups such as Diels-Alder cyclo-addition pairs or ring-closing metathesis pairs, and Michael reaction pairs.

[0621] In some embodiments, portions of the guide are first synthesized using the standard phosphoramidite synthetic protocol (Herdewijn, P., ed., Methods in Molecular Biology Col 288, Oligonucleotide Synthesis: Methods and Applications, Humana Press, New Jersey (2012)). In some embodiments, the non-targeting guide portions can be functionalized to contain an appropriate functional group for ligation using the standard protocol known in the art (Hermanson, G. T., Bioconjugate Techniques, Academic Press (2013)). Examples of functional groups include, but are not limited to, hydroxyl, amine, carboxylic acid, carboxylic acid halide, carboxylic acid active ester, aldehyde, carbonyl, chlorocarbonyl, imidazolylcarbonyl, hydrozide, semicarbazide, thio semicarbazide, thiol, maleimide, haloalkyl, sufonyl, ally, propargyl, diene, alkyne, and azide. Once a non-targeting portions of a guide is functionalized, a covalent chemical bond or linkage can be formed between the two oligonucleotides. Examples of chemical bonds include, but are not limited to, those based on carbamates, ethers, esters, amides, imines, amidines, aminotrizines, hydrozone, disulfides, thioethers, thioesters, phosphorothioates, phosphorodithioates, sulfonamides, sulfonates, fulfones, sulfoxides, ureas, thioureas, hydrazide, oxime, triazole, photolabile linkages, C—C bond forming groups such as Diels-Alder cyclo-addition pairs or ring-closing metathesis pairs, and Michael reaction pairs.

[0622] In some embodiments, one or more portions of a guide can be chemically synthesized. In some embodiments, the chemical synthesis uses automated, solid-phase oligonucleotide synthesis machines with 2′-acetoxyethyl orthoester (2′-ACE) (Scaringe et al., J. Am. Chem. Soc. (1998) 120: 11820-11821; Scaringe, Methods Enzymol. (2000) 317: 3-18) or 2′-thionocarbamate (2′-TC) chemistry (Dellinger et al., J. Am. Chem. Soc. (2011) 133: 11540-11546; Hendel et al., Nat. Biotechnol. (2015) 33:985-989).

[0623] In some embodiments, the guide portions can be covalently linked using various bioconjugation reactions, loops, bridges, and non-nucleotide links via modifications of sugar, internucleotide phosphodiester bonds, purine and pyrimidine residues. Sletten et al., Angew. Chem. Int. Ed. (2009) 48:6974-6998; Manoharan, M. Curr. Opin. Chem. Biol. (2004) 8: 570-9; Behlke et al., Oligonucleotides (2008) 18: 305-19; Watts, et al., Drug. Discov. Today (2008) 13: 842-55; Shukla, et al., ChemMedChem (2010) 5: 328-49.

[0624] In some embodiments, the guide portions can be covalently linked using click chemistry. In some embodiments, guide portions can be covalently linked using a triazole linker. In some embodiments, guide portions can be covalently linked using Huisgen 1,3-dipolar cycloaddition reaction involving an alkyne and azide to yield a highly stable triazole linker (He et al., ChemBioChem (2015) 17: 1809-1812; WO 2016/186745). In some embodiments, guide portions are covalently linked by ligating a 5′-hexyne portion and a 3′-azide portion. In some embodiments, either or both of the 5′-hexyne guide portion and a 3′-azide guide portion can be protected with 2′-acetoxyethl orthoester (2′-ACE) group, which can be subsequently removed using Dharmacon protocol (Scaringe et al., J. Am. Chem. Soc. (1998) 120: 11820-11821; Scaringe, Methods Enzymol. (2000) 317: 3-18).

[0625] In some embodiments, guide portions can be covalently linked via a linker (e.g., a non-nucleotide loop) that comprises a moiety such as spacers, attachments, bioconjugates, chromophores, reporter groups, dye labeled RNAs, and non-naturally occurring nucleotide analogues. More specifically, suitable spacers for purposes of this invention include, but are not limited to, polyethers (e.g., polyethylene glycols, polyalcohols, polypropylene glycol or mixtures of efhylene and propylene glycols), polyamines group (e.g., spennine, spermidine and polymeric derivatives thereof), polyesters (e.g., poly(ethyl acrylate)), polyphosphodiesters, alkylenes, and combinations thereof. Suitable attachments include any moiety that can be added to the linker to add additional properties to the linker, such as but not limited to, fluorescent labels. Suitable bioconjugates include, but are not limited to, peptides, glycosides, lipids, cholesterol, phospholipids, diacyl glycerols and dialkyl glycerols, fatty acids, hydrocarbons, enzyme substrates, steroids, biotin, digoxigenin, carbohydrates, polysaccharides. Suitable chromophores, reporter groups, and dye-labeled RNAs include, but are not limited to, fluorescent dyes such as fluorescein and rhodamine, chemiluminescent, electrochemiluminescent, and bioluminescent marker compounds. The design of example linkers conjugating two RNA components are also described in WO 2004/015075.

[0626] The linker (e.g., a non-nucleotide loop) can be of any length. In some embodiments, the linker has a length equivalent to about 0-16 nucleotides. In some embodiments, the linker has a length equivalent to about 0-8 nucleotides. In some embodiments, the linker has a length equivalent to about 0-4 nucleotides. In some embodiments, the linker has a length equivalent to about 2 nucleotides. Example linker design is also described in WO2011/008730.

[0627] In some embodiments, the degree of complementarity, when optimally aligned using a suitable alignment algorithm, is about or more than about 50%, 60%, 75%, 80%, 85%, 90%, 95%, 97.5%, 99%, or more. Optimal alignment may be determined with the use of any suitable algorithm for aligning sequences, non-limiting example of which include the Smith-Waterman algorithm, the Needleman-Wunsch algorithm, algorithms based on the Burrows-Wheeler Transform (e.g., the Burrows Wheeler Aligner), ClustalW, Clustal X, BLAT, Novoalign (Novocraft Technologies; available at www.novocraft.com), ELAND (Illumina, San Diego, Calif.), SOAP (available at soap.genomics.org.cn), and Maq (available at maq.sourceforge.net). The ability of a guide sequence (within a nucleic acid-targeting guide RNA) to direct sequence-specific binding of a nucleic acid-targeting complex to a target nucleic acid sequence may be assessed by any suitable assay. For example, the components of a nucleic acid-targeting CRISPR system sufficient to form a nucleic acid-targeting complex, including the guide sequence to be tested, may be provided to a host cell having the corresponding target nucleic acid sequence, such as by transfection with vectors encoding the components of the nucleic acid-targeting complex, followed by an assessment of preferential targeting (e.g., cleavage) within the target nucleic acid sequence, such as by Surveyor assay as described herein. Similarly, cleavage of a target nucleic acid sequence may be evaluated in a test tube by providing the target nucleic acid sequence, components of a nucleic acid-targeting complex, including the guide sequence to be tested and a control guide sequence different from the test guide sequence, and comparing binding or rate of cleavage at the target sequence between the test and control guide sequence reactions. Other assays are possible, and will occur to those skilled in the art. A guide sequence, and hence a nucleic acid-targeting guide RNA may be selected to target any target nucleic acid sequence. The target sequence may be DNA. The target sequence may be any RNA sequence. In some embodiments, the target sequence may be a sequence within a RNA molecule selected from the group consisting of messenger RNA (mRNA), pre-mRNA, ribosomaal RNA (rRNA), transfer RNA (tRNA), micro-RNA (miRNA), small interfering RNA (siRNA), small nuclear RNA (snRNA), small nucleolar RNA (snoRNA), double stranded RNA (dsRNA), non coding RNA (ncRNA), long non-coding RNA (lncRNA), and small cytoplasmatic RNA (scRNA). In some preferred embodiments, the target sequence may be a sequence within a RNA molecule selected from the group consisting of mRNA, pre-mRNA, and rRNA. In some preferred embodiments, the target sequence may be a sequence within a RNA molecule selected from the group consisting of ncRNA, and lncRNA. In some more preferred embodiments, the target sequence may be a sequence within an mRNA molecule or a pre-mRNA molecule.

[0628] In some embodiments, a nucleic acid-targeting guide RNA is selected to reduce the degree secondary structure within the RNA-targeting guide RNA. In some embodiments, about or less than about 75%, 50%, 40%, 30%, 25%, 20%, 15%, 10%, 5%, 1%, or fewer of the nucleotides of the nucleic acid-targeting guide RNA participate in self-complementary base pairing when optimally folded. Optimal folding may be determined by any suitable polynucleotide folding algorithm. Some programs are based on calculating the minimal Gibbs free energy. An example of one such algorithm is mFold, as described by Zuker and Stiegler (Nucleic Acids Res. 9 (1981), 133-148). Another example folding algorithm is the online webserver RNAfold, developed at Institute for Theoretical Chemistry at the University of Vienna, using the centroid structure prediction algorithm (see e.g., A. R. Gruber et al., 2008, Cell 106(1): 23-24; and PA Carr and GM Church, 2009, Nature Biotechnology 27(12): 1151-62).

[0629] In certain embodiments, a guide RNA or crRNA may comprise, consist essentially of, or consist of a direct repeat (DR) sequence and a guide sequence or spacer sequence. In certain embodiments, the guide RNA or crRNA may comprise, consist essentially of, or consist of a direct repeat sequence fused or linked to a guide sequence or spacer sequence. In certain embodiments, the direct repeat sequence may be located upstream (i.e., 5′) from the guide sequence or spacer sequence. In other embodiments, the direct repeat sequence may be located downstream (i.e., 3′) from the guide sequence or spacer sequence.

[0630] In certain embodiments, the crRNA comprises a stem loop, preferably a single stem loop. In certain embodiments, the direct repeat sequence forms a stem loop, preferably a single stem loop.

[0631] In certain embodiments, the spacer length of the guide RNA is from 15 to 35 nt. In certain embodiments, the spacer length of the guide RNA is at least 15 nucleotides, preferably at least 18 nt, such at at least 19, 20, 21, 22, or more nt. In certain embodiments, the spacer length is from 15 to 17 nt, e.g., 15, 16, or 17 nt, from 17 to 20 nt, e.g., 17, 18, 19, or 20 nt, from 20 to 24 nt, e.g., 20, 21, 22, 23, or 24 nt, from 23 to 25 nt, e.g., 23, 24, or 25 nt, from 24 to 27 nt, e.g., 24, 25, 26, or 27 nt, from 27-30 nt, e.g., 27, 28, 29, or 30 nt, from 30-35 nt, e.g., 30, 31, 32, 33, 34, or 35 nt, or 35 nt or longer.

[0632] Applicants also perform a challenge experiment to verify the RNA targeting and cleaving capability of a Cas13c. This experiment closely parallels similar work in E. coli for the heterologous expression of StCas9 (Sapranauskas, R. et al. Nucleic Acids Res 39, 9275-9282 (2011)). Applicants introduce a plasmid containing both a PAM and a resistance gene into the heterologous E. coli, and then plate on the corresponding antibiotic. If there is RNA cleavage of the plasmid transcribed resistance gene, Applicants observe no viable colonies.

[0633] In further detail, the assay is as follows for a DNA target, but may be adapted accordingly for an RNA target. Two E. coli strains are used in this assay. One carries a plasmid that encodes the endogenous effector protein locus from the bacterial strain. The other strain carries an empty plasmid (e.g. pACYC184, control strain). All possible 7 or 8 bp PAM sequences are presented on an antibiotic resistance plasmid (pUC19 with ampicillin resistance gene). The PAM is located next to the sequence of proto-spacer 1 (the DNA target to the first spacer in the endogenous effector protein locus). Two PAM libraries were cloned. One has a 8 random bp 5′ of the proto-spacer (e.g. total of 65536 different PAM sequences=complexity). The other library has 7 random bp 3′ of the proto-spacer (e.g. total complexity is 16384 different PAMs). Both libraries were cloned to have in average 500 plasmids per possible PAM. Test strain and control strain were transformed with 5′PAM and 3′PAM library in separate transformations and transformed cells were plated separately on ampicillin plates. Recognition and subsequent cutting/interference with the plasmid renders a cell vulnerable to ampicillin and prevents growth. Approximately 12h after transformation, all colonies formed by the test and control strains where harvested and plasmid DNA was isolated. Plasmid DNA was used as template for PCR amplification and subsequent deep sequencing. Representation of all PAMs in the untransfomed libraries showed the expected representation of PAMs in transformed cells. Representation of all PAMs found in control strains showed the actual representation. Representation of all PAMs in test strain showed which PAMs are not recognized by the enzyme and comparison to the control strain allows extracting the sequence of the depleted PAM.

[0634] For minimization of toxicity and off-target effect, it will be important to control the concentration of nucleic acid-targeting guide RNA delivered. Optimal concentrations of nucleic acid-targeting guide RNA can be determined by testing different concentrations in a cellular or non-human eukaryote animal model and using deep sequencing the analyze the extent of modification at potential off-target genomic loci. The concentration that gives the highest level of on-target modification while minimizing the level of off-target modification should be chosen for in vivo delivery. The nucleic acid-targeting system is derived advantageously from a Type VI CRISPR system. In some embodiments, one or more elements of a nucleic acid-targeting system is derived from a particular organism comprising an endogenous RNA-targeting system. In particular embodiments, the Type VI RNA-targeting Cas enzyme is Cas13c. Non-limiting examples of Cas proteins include Cas1, Cas1B, Cas2, Cas3, Cas4, Cas5, Cash, Cas7, Cas8, Cas9 (also known as Csn1 and Csx12), Cas10, Csy1, Csy2, Csy3, Cse1, Cse2, Csc1, Csc2, Csa5, Csn2, Csm2, Csm3, Csm4, Csm5, Csm6, Cmr1, Cmr3, Cmr4, Cmr5, Cmr6, Csb1, Csb2, Csb3, Csx17, Csx14, Csx10, Csx16, CsaX, Csx3, Csxl, Csx15, Csf1, Csf2, Csf3, Csf4, homologues thereof, or modified versions thereof. In embodiments, the Type VI protein such as Cas13 referred to herein also encompasses a homologue or an orthologue of a Type VI protein such as Cas13c. The terms “orthologue” (also referred to as “ortholog” herein) and “homologue” (also referred to as “homolog” herein) are well known in the art. By means of further guidance, a “homologue” of a protein as used herein is a protein of the same species which performs the same or a similar function as the protein it is a homologue of Homologous proteins may but need not be structurally related, or are only partially structurally related. An “orthologue” of a protein as used herein is a protein of a different species which performs the same or a similar function as the protein it is an orthologue of Orthologous proteins may but need not be structurally related, or are only partially structurally related. In particular embodiments, the homologue or orthologue of a Type VI protein such as Cas13c as referred to herein has a sequence homology or identity of at least 80%, more preferably at least 85%, even more preferably at least 90%, such as for instance at least 95% with a Type VI protein such as Cas13c. In further embodiments, the homologue or orthologue of a Type VI protein such as Cas13c as referred to herein has a sequence identity of at least 80%, more preferably at least 85%, even more preferably at least 90%, such as for instance at least 95% with the wild type Type VI protein such as Cas13c.

[0635] In an embodiment, the Type VI RNA-targeting Cas protein may be a Cas13cortholog of an organism of a genus which includes but is not limited to Leptotrichia, Listeria, Corynebacter, Sutterella, Legionella, Treponema, Filifactor, Eubacterium, Streptococcus, Lactobacillus, Mycoplasma, Bacteroides, Flaviivola, Flavobacterium, Sphaerochaeta, Azospirillum, Gluconacetobacter, Neisseria, Roseburia, Parvibaculum, Staphylococcus, Nitratifractor, Mycoplasma and Campylobacter. Species of organism of such a genus can be as otherwise herein discussed.

[0636] Some methods of identifying orthologs of CRISPR-Cas system enzymes may involve identifying tracr sequences in genomes of interest. Identification of tracr sequences may relate to the following steps: Search for the direct repeats or tracr mate sequences in a database to identify a CRISPR region comprising a CRISPR enzyme. Search for homologous sequences in the CRISPR region flanking the CRISPR enzyme in both the sense and antisense directions. Look for transcriptional terminators and secondary structures. Identify any sequence that is not a direct repeat or a tracr mate sequence but has more than 50% identity to the direct repeat or tracr mate sequence as a potential tracr sequence. Take the potential tracr sequence and analyze for transcriptional terminator sequences associated therewith.

[0637] It will be appreciated that any of the functionalities described herein may be engineered into CRISPR enzymes from other orthologs, including chimeric enzymes comprising fragments from multiple orthologs. Examples of such orthologs are described elsewhere herein. Thus, chimeric enzymes may comprise fragments of CRISPR enzyme orthologs of an organism which includes but is not limited to Leptotrichia, Listeria, Corynebacter, Sutterella, Legionella, Treponema, Filifactor, Eubacterium, Streptococcus, Lactobacillus, Mycoplasma, Bacteroides, Flaviivola, Flavobacterium, Sphaerochaeta, Azospirillum, Gluconacetobacter, Neisseria, Roseburia, Parvibaculum, Staphylococcus, Nitratifractor, Mycoplasma and Campylobacter. A chimeric enzyme can comprise a first fragment and a second fragment, and the fragments can be of CRISPR enzyme orthologs of organisms of genuses herein mentioned or of species herein mentioned; advantageously the fragments are from CRISPR enzyme orthologs of different species.

[0638] In embodiments, the Type VI RNA-targeting effector protein, in particular the Cas13c protein as referred to herein also encompasses a functional variant of Cas13c or a homologue or an orthologue thereof. A “functional variant” of a protein as used herein refers to a variant of such protein which retains at least partially the activity of that protein. Functional variants may include mutants (which may be insertion, deletion, or replacement mutants), including polymorphs, etc. Also included within functional variants are fusion products of such protein with another, usually unrelated, nucleic acid, protein, polypeptide or peptide. Functional variants may be naturally occurring or may be man-made. Advantageous embodiments can involve engineered or non-naturally occurring Type VI RNA-targeting effector protein.

[0639] In an embodiment of the invention, there is provided an effector protein which comprises an amino acid sequence having at least 80% sequence homology to the wild-type sequence of any of Fusobacterium necrophorum subsp. funduliforme ATCC 51357; Fusobacterium necrophorum DJ-2; Fusobacterium necrophorum BFTR-1; Fusobacterium necrophorum subsp. funduliforme 1_1_36S; Fusobacterium perfoetens ATCC 29250 T364; Fusobacterium ulcerans ATCC 49185; Anaerosalibacter sp. ND1; Cetobacterium sp. ZOR0034; Anaerosilobacter massiliensis; Fusobacterium varium; or Tissierella sp. P1.

[0640] In an embodiment of the invention, the effector protein comprises an amino acid sequence having at least 80% sequence homology to a Type VI effector protein consensus sequence including but not limited to a consensus sequence described herein.

[0641] In an embodiment of the invention, the effector protein comprises at least one HEPN domain, including but not limited to HEPN domains described herein, HEPN domains known in the art, and domains recognized to be HEPN domains by comparison to consensus sequences and motifs. Several such domains are provided herein. In one non-limiting example, a consensus sequence can be derived from the sequences of Cas13c orthologs provided herein.

[0642] In an embodiment of the invention, the effector protein comprises one or more HEPN domains comprising a_RxxxxH motif sequence. The RxxxxH motif sequence can be, without limitation, from an HEPN domain described herein or an HEPN domain known in the art. RxxxxH motifs sequences further include motif sequences created by combining portions of two or more HEPN domains. As noted, consensus sequences can be derived from the sequences of the 15 orthologs disclosed in U.S. 62/432,240 (BI-10035). For example, from the above sequence alignment, the first HEPN domain comprises a R{N/H}xxxH motif whereas the second HEPN domain comprises a R{N/K}xxxH motif.

[0643] In an embodiment of the invention, a HEPN domain comprises at least one RxxxxH motif comprising the sequence of R{N/H/K}X₁X₂X₃H. In an embodiment of the invention, a HEPN domain comprises a RxxxxH motif comprising the sequence of R{N/H}X₁X₂X₃H. In an embodiment of the invention, a HEPN domain comprises the sequence of R{N/K}X₁X₂X₃H. In certain embodiments, X₁ is R, S, D, E, Q, N, G, Y, or H. In certain embodiments, X₂ is I, S, T, V, or L. In certain embodiments, X₃ is L, F, N, Y, V, I, S, D, E, or A.

[0644] Additional effectors for use according to the invention can be identified by their proximity to cas1 genes, for example, though not limited to, within the region 20 kb from the start of the cas1 gene and 20 kb from the end of the cas1 gene. In certain embodiment, the effector protein comprises at least one HEPN domain and at least 500 amino acids, and wherein the Cas13c effector protein is naturally present in a prokaryotic genome within 20 kb upstream or downstream of a Cas1 gene or a CRISPR array.

[0645] In an embodiment, nucleic acid molecule(s) encoding the Type VI RNA-targeting effector protein, in particular Cas13c or an ortholog or homolog thereof, may be codon-optimized for expression in an eukaryotic cell. A eukaryote can be as herein discussed. Nucleic acid molecule(s) can be engineered or non-naturally occurring.

[0646] In an embodiment, the Type VI RNA-targeting effector protein, in particular Cas13c or an ortholog or homolog thereof, may comprise one or more mutations (and hence nucleic acid molecule(s) coding for same may have mutation(s). The mutations may be artificially introduced mutations and may include but are not limited to one or more mutations in a catalytic domain. Examples of catalytic domains with reference to a Cas9 enzyme may include but are not limited to RuvC I, RuvC II, RuvC III and HNH domains.

[0647] In an embodiment, the Type VI protein such as Cas13c or an ortholog or homolog thereof, may comprise one or more mutations. The mutations may be artificially introduced mutations and may include but are not limited to one or more mutations in a catalytic domain. Examples of catalytic domains with reference to a Cas enzyme may include but are not limited to HEPN domains.

[0648] In an embodiment, the Type VI protein such as Cas13c or an ortholog or homolog thereof, may be used as a generic nucleic acid binding protein with fusion to or being operably linked to a functional domain. Exemplary functional domains may include but are not limited to translational initiator, translational activator, translational repressor, nucleases, in particular ribonucleases, a spliceosome, beads, a light inducible/controllable domain or a chemically inducible/controllable domain.

[0649] In some embodiments, the unmodified nucleic acid-targeting effector protein may have cleavage activity. In some embodiments, the RNA-targeting effector protein may direct cleavage of one or both nucleic acid (DNA or RNA) strands at the location of or near a target sequence, such as within the target sequence and/or within the complement of the target sequence or at sequences associated with the target sequence. In some embodiments, the nucleic acid-targeting Cas protein may direct cleavage of one or both DNA or RNA strands within about 1, 2, 3, 4, 5, 6, 7, 8, 9, 10, 15, 20, 25, 50, 100, 200, 500, or more base pairs from the first or last nucleotide of a target sequence. In some embodiments, a vector encodes a nucleic acid-targeting Cas protein that may be mutated with respect to a corresponding wild-type enzyme such that the mutated nucleic acid-targeting Cas protein lacks the ability to cleave RNA strands of a target polynucleotide containing a target sequence. As a further example, two or more catalytic domains of Cas (e.g. HEPN domain) may be mutated to produce a mutated Cas substantially lacking all RNA cleavage activity. In some embodiments, a nucleic acid-targeting effector protein may be considered to substantially lack all RNA cleavage activity when the RNA cleavage activity of the mutated enzyme is about no more than 25%, 10%, 5%, 1%, 0.1%, 0.01%, or less of the nucleic acid cleavage activity of the non-mutated form of the enzyme; an example can be when the nucleic acid cleavage activity of the mutated form is nil or negligible as compared with the non-mutated form. An effector protein may be identified with reference to the general class of enzymes that share homology to the biggest nuclease with multiple nuclease domains from the Type VI CRISPR system. Most preferably, the effector protein is a Type VI protein such as Cas13c. By derived, Applicants mean that the derived enzyme is largely based, in the sense of having a high degree of sequence homology with, a wildtype enzyme, but that it has been mutated (modified) in some way as known in the art or as described herein.

[0650] Again, it will be appreciated that the terms Cas and CRISPR enzyme and CRISPR protein and Cas protein are generally used interchangeably and at all points of reference herein refer by analogy to novel CRISPR effector proteins further described in this application, unless otherwise apparent, such as by specific reference to Cas9. As mentioned above, many of the residue numberings used herein refer to the effector protein from the Type VI CRISPR locus. However, it will be appreciated that this invention includes many more effector proteins from other species of microbes. In certain embodiments, Cas may be constitutively present or inducibly present or conditionally present or administered or delivered. Cas optimization may be used to enhance function or to develop new functions, one can generate chimeric Cas proteins. And Cas may be used as a generic nucleic acid binding protein.

[0651] Typically, in the context of an endogenous nucleic acid-targeting system, formation of a nucleic acid-targeting complex (comprising a guide RNA hybridized to a target sequence and complexed with one or more nucleic acid-targeting effector proteins) results in cleavage of one or both DNA or RNA strands in or near (e.g., within 1, 2, 3, 4, 5, 6, 7, 8, 9, 10, 20, 50, 100, 200, 500, or more base pairs from) the target sequence. As used herein the term “sequence(s) associated with a target locus of interest” refers to sequences near the vicinity of the target sequence (e.g. within 1, 2, 3, 4, 5, 6, 7, 8, 9, 10, 20, 50, 100, 200, 500, or more base pairs from the target sequence, wherein the target sequence is comprised within a target locus of interest).

[0652] An example of a codon optimized sequence, is in this instance a sequence optimized for expression in a eukaryote, e.g., humans (i.e. being optimized for expression in humans), or for another eukaryote, animal or mammal as herein discussed; see, e.g., SaCas9 human codon optimized sequence in WO 2014/093622 (PCT/US2013/074667) as an example of a codon optimized sequence (from knowledge in the art and this disclosure, codon optimizing coding nucleic acid molecule(s), especially as to effector protein (e.g., Cas13c) is within the ambit of the skilled artisan). Whilst this is preferred, it will be appreciated that other examples are possible and codon optimization for a host species other than human, or for codon optimization for specific organs is known. In some embodiments, an enzyme coding sequence encoding a DNA/RNA-targeting Cas protein is codon optimized for expression in particular cells, such as eukaryotic cells. The eukaryotic cells may be those of or derived from a particular organism, such as a mammal, including but not limited to human, or non-human eukaryote or animal or mammal as herein discussed, e.g., mouse, rat, rabbit, dog, livestock, or non-human mammal or primate. In some embodiments, processes for modifying the germ line genetic identity of human beings and/or processes for modifying the genetic identity of animals which are likely to cause them suffering without any substantial medical benefit to man or animal, and also animals resulting from such processes, may be excluded. In general, codon optimization refers to a process of modifying a nucleic acid sequence for enhanced expression in the host cells of interest by replacing at least one codon (e.g., about or more than about 1, 2, 3, 4, 5, 10, 15, 20, 25, 50, or more codons) of the native sequence with codons that are more frequently or most frequently used in the genes of that host cell while maintaining the native amino acid sequence. Various species exhibit particular bias for certain codons of a particular amino acid. Codon bias (differences in codon usage between organisms) often correlates with the efficiency of translation of messenger RNA (mRNA), which is in turn believed to be dependent on, among other things, the properties of the codons being translated and the availability of particular transfer RNA (tRNA) molecules. The predominance of selected tRNAs in a cell is generally a reflection of the codons used most frequently in peptide synthesis. Accordingly, genes can be tailored for optimal gene expression in a given organism based on codon optimization. Codon usage tables are readily available, for example, at the “Codon Usage Database” available at www.kazusa.orjp/codon/ and these tables can be adapted in a number of ways. See Nakamura, Y., et al. “Codon usage tabulated from the international DNA sequence databases: status for the year 2000” Nucl. Acids Res. 28:292 (2000). Computer algorithms for codon optimizing a particular sequence for expression in a particular host cell are also available, such as Gene Forge (Aptagen; Jacobus, Pa.), are also available. In some embodiments, one or more codons (e.g., 1, 2, 3, 4, 5, 10, 15, 20, 25, 50, or more, or all codons) in a sequence encoding a DNA/RNA-targeting Cas protein corresponds to the most frequently used codon for a particular amino acid.

[0653] In some embodiments, a vector encodes a nucleic acid-targeting effector protein such as the Cas13c, or an ortholog or homolog thereof comprising one or more nuclear localization sequences (NLSs) or nuclear export sequences (NESs), such as about or more than about 1, 2, 3, 4, 5, 6, 7, 8, 9, 10, or more NLSs or NESs. In some embodiments, the RNA-targeting effector protein comprises about or more than about 1, 2, 3, 4, 5, 6, 7, 8, 9, 10, or more NLSs or NESs at or near the amino-terminus, about or more than about 1, 2, 3, 4, 5, 6, 7, 8, 9, 10, or more NLSs or NESs at or near the carboxy-terminus, or a combination of these (e.g., zero or at least one or more NLS or NES at the amino-terminus and zero or at one or more NLS or NES at the carboxy terminus). When more than one NLS or NES is present, each may be selected independently of the others, such that a single NLS or NES may be present in more than one copy and/or in combination with one or more other NLSs or NESs present in one or more copies. In some embodiments, an NLS or NES is considered near the N- or C-terminus when the nearest amino acid of the NLS or NES is within about 1, 2, 3, 4, 5, 10, 15, 20, 25, 30, 40, 50, or more amino acids along the polypeptide chain from the N- or C-terminus. Non-limiting examples of NLSs include an NLS sequence derived from: the NLS of the SV40 virus large T-antigen, having the amino acid sequence PKKKRKV; the NLS from nucleoplasmin (e.g., the nucleoplasmin bipartite NLS with the sequence KRPAATKKAGQAKKKK); the c-myc NLS having the amino acid sequence PAAKRVKLD or RQRRNELKRSP; the hRNPA1 M9 NLS having the sequence NQSSNFGPMKGGNFGGRSSGPYGGGGQYFAKPRNQGGY; the sequence RMRIZFKNKGKDTAELRRRRVEVSVELRKAKKDEQILKRRNV of the IBB domain from importin-alpha; the sequences VSRKRPRP and PPKKARED of the myoma T protein; the sequence POPKKKPL of human p53; the sequence SALIKKKKKMAP of mouse c-abl IV; the sequences DRLRR and PKQKKRK of the influenza virus NS1; the sequence RKLKKKIKKL of the Hepatitis virus delta antigen; the sequence REKKKFLKRR of the mouse Mx1 protein; the sequence KRKGDEVDGVDEVAKKKSKK of the human poly(ADP-ribose) polymerase; and the sequence RKCLQAGMNLEARKTKK (SEQ ID Nos. 1-16 previously identified) of the steroid hormone receptors (human) glucocorticoid. In general, the one or more NLSs or NESs are of sufficient strength to drive accumulation of the DNA/RNA-targeting Cas protein in a detectable amount in respectively the nucleus or cytoplasm of a eukaryotic cell. In general, strength of nuclear/cytoplasmic localization activity may derive from the number of NLSs or NESs in the nucleic acid-targeting effector protein, the particular NLS(s) or NES(s) used, or a combination of these factors. Detection of accumulation in the nucleus/cytoplasm may be performed by any suitable technique. For example, a detectable marker may be fused to the nucleic acid-targeting protein, such that location within a cell may be visualized, such as in combination with a means for detecting the location of the nucleus (e.g., a stain specific for the nucleus such as DAPI) or cytoplasm. Cell nuclei may also be isolated from cells, the contents of which may then be analyzed by any suitable process for detecting protein, such as immunohistochemistry, Western blot, or enzyme activity assay. Accumulation in the nucleus/cytoplasm may also be determined indirectly, such as by an assay for the effect of nucleic acid-targeting complex formation (e.g., assay for RNA cleavage or mutation at the target sequence, or assay for altered gene expression activity affected by RNA-targeting complex formation and/or RNA-targeting Cas protein activity), as compared to a control not exposed to the nucleic acid-targeting Cas protein or nucleic acid-targeting complex, or exposed to a nucleic acid-targeting Cas protein lacking the one or more NLSs or NESs. In preferred embodiments of the herein described Cas13c effector protein complexes and systems the codon optimized Cas13c effector proteins comprise an NLS or NES attached to the C-terminal of the protein.

[0654] In some embodiments, one or more vectors driving expression of one or more elements of a nucleic acid-targeting system are introduced into a host cell such that expression of the elements of the nucleic acid-targeting system direct formation of a nucleic acid-targeting complex at one or more target sites. For example, a nucleic acid-targeting effector enzyme and a nucleic acid-targeting guide RNA could each be operably linked to separate regulatory elements on separate vectors. RNA(s) of the nucleic acid-targeting system can be delivered to a transgenic nucleic acid-targeting effector protein animal or mammal, e.g., an animal or mammal that constitutively or inducibly or conditionally expresses nucleic acid-targeting effector protein; or an animal or mammal that is otherwise expressing nucleic acid-targeting effector proteinor has cells containing nucleic acid-targeting effector protein, such as by way of prior administration thereto of a vector or vectors that code for and express in vivo nucleic acid-targeting effector protein. Alternatively, two or more of the elements expressed from the same or different regulatory elements, may be combined in a single vector, with one or more additional vectors providing any components of the nucleic acid-targeting system not included in the first vector. nucleic acid-targeting system elements that are combined in a single vector may be arranged in any suitable orientation, such as one element located 5′ with respect to (“upstream” of) or 3′ with respect to (“downstream” of) a second element. The coding sequence of one element may be located on the same or opposite strand of the coding sequence of a second element, and oriented in the same or opposite direction. In some embodiments, a single promoter drives expression of a transcript encoding a nucleic acid-targeting effector protein and the nucleic acid-targeting guide RNA, embedded within one or more intron sequences (e.g., each in a different intron, two or more in at least one intron, or all in a single intron). In some embodiments, the nucleic acid-targeting effector protein and the nucleic acid-targeting guide RNA may be operably linked to and expressed from the same promoter. Delivery vehicles, vectors, particles, nanoparticles, formulations and components thereof for expression of one or more elements of a nucleic acid-targeting system are as used in the foregoing documents, such as WO 2014/093622 (PCT/US2013/074667). In some embodiments, a vector comprises one or more insertion sites, such as a restriction endonuclease recognition sequence (also referred to as a “cloning site”). In some embodiments, one or more insertion sites (e.g., about or more than about 1, 2, 3, 4, 5, 6, 7, 8, 9, 10, or more insertion sites) are located upstream and/or downstream of one or more sequence elements of one or more vectors. In some embodiments, a vector comprises two or more insertion sites, so as to allow insertion of a guide sequence at each site. In such an arrangement, the two or more guide sequences may comprise two or more copies of a single guide sequence, two or more different guide sequences, or combinations of these. When multiple different guide sequences are used, a single expression construct may be used to target nucleic acid-targeting activity to multiple different, corresponding target sequences within a cell. For example, a single vector may comprise about or more than about 1, 2, 3, 4, 5, 6, 7, 8, 9, 10, 15, 20, or more guide sequences. In some embodiments, about or more than about 1, 2, 3, 4, 5, 6, 7, 8, 9, 10, or more such guide-sequence-containing vectors may be provided, and optionally delivered to a cell. In some embodiments, a vector comprises a regulatory element operably linked to an enzyme-coding sequence encoding a a nucleic acid-targeting effector protein. nucleic acid-targeting effector protein or nucleic acid-targeting guide RNA or RNA(s) can be delivered separately; and advantageously at least one of these is delivered via a particle or nanoparticle complex. nucleic acid-targeting effector protein mRNA can be delivered prior to the nucleic acid-targeting guide RNA to give time for nucleic acid-targeting effector protein to be expressed. nucleic acid-targeting effector protein mRNA might be administered 1-12 hours (preferably around 2-6 hours) prior to the administration of nucleic acid-targeting guide RNA. Alternatively, nucleic acid-targeting effector protein mRNA and nucleic acid-targeting guide RNA can be administered together. Advantageously, a second booster dose of guide RNA can be administered 1-12 hours (preferably around 2-6 hours) after the initial administration of nucleic acid-targeting effector protein mRNA+guide RNA. Additional administrations of nucleic acid-targeting effector protein mRNA and/or guide RNA might be useful to achieve the most efficient levels of genome and/or transcriptome modification.

[0655] In one aspect, the invention provides methods for using one or more elements of a nucleic acid-targeting system. The nucleic acid-targeting complex of the invention provides an effective means for modifying a target RNA. The nucleic acid-targeting complex of the invention has a wide variety of utility including modifying (e.g., deleting, inserting, translocating, inactivating, activating) a target RNA in a multiplicity of cell types. As such the nucleic acid-targeting complex of the invention has a broad spectrum of applications in, e.g., gene therapy, drug screening, disease diagnosis, and prognosis. An exemplary nucleic acid-targeting complex comprises a RNA-targeting effector protein complexed with a guide RNA hybridized to a target sequence within the target locus of interest.

[0656] In one embodiment, this invention provides a method of cleaving a target RNA. The method may comprise modifying a target RNA using a nucleic acid-targeting complex that binds to the target RNA and effect cleavage of said target RNA. In an embodiment, the nucleic acid-targeting complex of the invention, when introduced into a cell, may create a break (e.g., a single or a double strand break) in the RNA sequence. For example, the method can be used to cleave a disease RNA in a cell. For example, an exogenous RNA template comprising a sequence to be integrated flanked by an upstream sequence and a downstream sequence may be introduced into a cell. The upstream and downstream sequences share sequence similarity with either side of the site of integration in the RNA. Where desired, a donor RNA can be mRNA. The exogenous RNA template comprises a sequence to be integrated (e.g., a mutated RNA). The sequence for integration may be a sequence endogenous or exogenous to the cell. Examples of a sequence to be integrated include RNA encoding a protein or a non-coding RNA (e.g., a microRNA). Thus, the sequence for integration may be operably linked to an appropriate control sequence or sequences. Alternatively, the sequence to be integrated may provide a regulatory function. The upstream and downstream sequences in the exogenous RNA template are selected to promote recombination between the RNA sequence of interest and the donor RNA. The upstream sequence is a RNA sequence that shares sequence similarity with the RNA sequence upstream of the targeted site for integration. Similarly, the downstream sequence is a RNA sequence that shares sequence similarity with the RNA sequence downstream of the targeted site of integration. The upstream and downstream sequences in the exogenous RNA template can have 75%, 80%, 85%, 90%, 95%, or 100% sequence identity with the targeted RNA sequence. Preferably, the upstream and downstream sequences in the exogenous RNA template have about 95%, 96%, 97%, 98%, 99%, or 100% sequence identity with the targeted RNA sequence. In some methods, the upstream and downstream sequences in the exogenous RNA template have about 99% or 100% sequence identity with the targeted RNA sequence. An upstream or downstream sequence may comprise from about 20 bp to about 2500 bp, for example, about 50, 100, 200, 300, 400, 500, 600, 700, 800, 900, 1000, 1100, 1200, 1300, 1400, 1500, 1600, 1700, 1800, 1900, 2000, 2100, 2200, 2300, 2400, or 2500 bp. In some methods, the exemplary upstream or downstream sequence have about 200 bp to about 2000 bp, about 600 bp to about 1000 bp, or more particularly about 700 bp to about 1000 bp. In some methods, the exogenous RNA template may further comprise a marker. Such a marker may make it easy to screen for targeted integrations. Examples of suitable markers include restriction sites, fluorescent proteins, or selectable markers. The exogenous RNA template of the invention can be constructed using recombinant techniques (see, for example, Sambrook et al., 2001 and Ausubel et al., 1996). In a method for modifying a target RNA by integrating an exogenous RNA template, a break (e.g., double or single stranded break in double or single stranded DNA or RNA) is introduced into the DNA or RNA sequence by the nucleic acid-targeting complex, the break is repaired via homologous recombination with an exogenous RNA template such that the template is integrated into the RNA target. The presence of a double-stranded break facilitates integration of the template. In other embodiments, this invention provides a method of modifying expression of a RNA in a eukaryotic cell. The method comprises increasing or decreasing expression of a target polynucleotide by using a nucleic acid-targeting complex that binds to the RNA (e.g., mRNA or pre-mRNA). In some methods, a target RNA can be inactivated to effect the modification of the expression in a cell. For example, upon the binding of a RNA-targeting complex to a target sequence in a cell, the target RNA is inactivated such that the sequence is not translated, the coded protein is not produced, or the sequence does not function as the wild-type sequence does. For example, a protein or microRNA coding sequence may be inactivated such that the protein or microRNA or pre-microRNA transcript is not produced. The target RNA of a RNA-targeting complex can be any RNA endogenous or exogenous to the eukaryotic cell. For example, the target RNA can be a RNA residing in the nucleus of the eukaryotic cell. The target RNA can be a sequence (e.g., mRNA or pre-mRNA) coding a gene product (e.g., a protein) or a non-coding sequence (e.g., ncRNA, lncRNA, tRNA, or rRNA). Examples of target RNA include a sequence associated with a signaling biochemical pathway, e.g., a signaling biochemical pathway-associated RNA. Examples of target RNA include a disease associated RNA. A “disease-associated” RNA refers to any RNA which is yielding translation products at an abnormal level or in an abnormal form in cells derived from a disease-affected tissues compared with tissues or cells of a non disease control. It may be a RNA transcribed from a gene that becomes expressed at an abnormally high level; it may be a RNA transcribed from a gene that becomes expressed at an abnormally low level, where the altered expression correlates with the occurrence and/or progression of the disease. A disease-associated RNA also refers to a RNA transcribed from a gene possessing mutation(s) or genetic variation that is directly responsible or is in linkage disequilibrium with a gene(s) that is responsible for the etiology of a disease. The translated products may be known or unknown, and may be at a normal or abnormal level. The target RNA of a RNA-targeting complex can be any RNA endogenous or exogenous to the eukaryotic cell. For example, the target RNA can be a RNA residing in the nucleus of the eukaryotic cell. The target RNA can be a sequence (e.g., mRNA or pre-mRNA) coding a gene product (e.g., a protein) or a non-coding sequence (e.g., ncRNA, lncRNA, tRNA, or rRNA).

[0657] In some embodiments, the method may comprise allowing a nucleic acid-targeting complex to bind to the target RNA to effect cleavage of said target RNA or RNA thereby modifying the target RNA, wherein the nucleic acid-targeting complex comprises a nucleic acid-targeting effector protein complexed with a guide RNA hybridized to a target sequence within said target RNA. In one aspect, the invention provides a method of modifying expression of RNA in a eukaryotic cell. In some embodiments, the method comprises allowing a nucleic acid-targeting complex to bind to the RNA such that said binding results in increased or decreased expression of said RNA; wherein the nucleic acid-targeting complex comprises a nucleic acid-targeting effector protein complexed with a guide RNA. Similar considerations and conditions apply as above for methods of modifying a target RNA. In fact, these sampling, culturing and re-introduction options apply across the aspects of the present invention. In one aspect, the invention provides for methods of modifying a target RNA in a eukaryotic cell, which may be in vivo, ex vivo or in vitro. In some embodiments, the method comprises sampling a cell or population of cells from a human or non-human animal, and modifying the cell or cells. Culturing may occur at any stage ex vivo. The cell or cells may even be re-introduced into the non-human animal or plant. For re-introduced cells it is particularly preferred that the cells are stem cells.

[0658] Indeed, in any aspect of the invention, the nucleic acid-targeting complex may comprise a nucleic acid-targeting effector protein complexed with a guide RNA hybridized to a target sequence.

[0659] The invention relates to the engineering and optimization of systems, methods and compositions used for the control of gene expression involving RNA sequence targeting, that relate to the nucleic acid-targeting system and components thereof. In advantageous embodiments, the effector proteinenzyme is a Type VI protein such as Cas13c. An advantage of the present methods is that the CRISPR system minimizes or avoids off-target binding and its resulting side effects.

[0660] This is achieved using systems arranged to have a high degree of sequence specificity for the target RNA.

[0661] In relation to a nucleic acid-targeting complex or system preferably, the tracr sequence has one or more hairpins and is 30 or more nucleotides in length, 40 or more nucleotides in length, or 50 or more nucleotides in length; the crRNA sequence is between 10 to 30 nucleotides in length, the nucleic acid-targeting effector protein is a Type VI effector protein.

[0662] In certain embodiments, the effector protein may be a Listeria sp. Cas13cp, preferably Listeria seeligeria Cas13cp, more preferably Listeria seeligeria serovar ½b str. SLCC3954 Cas13cp and the crRNA sequence may be 44 to 47 nucleotides in length, with a 5′ 29-nt direct repeat (DR) and a 15-nt to 18-nt spacer.

[0663] In certain embodiments, the effector protein may be a Leptotrichia sp. Cas13cp, preferably Leptotrichia shahii Cas13cp, more preferably Leptotrichia shahii DSM 19757 Cas13cp and the crRNA sequence may be 42 to 58 nucleotides in length, with a 5′ direct repeat of at least 24 nt, such as a 5′ 24-28-nt direct repeat (DR) and a spacer of at least 14 nt, such as a 14-nt to 28-nt spacer, or a spacer of at least 18 nt, such as 19, 20, 21, 22, or more nt, such as 18-28, 19-28, 20-28, 21-28, or 22-28 nt.

[0664] More preferably, the effector protein may be a Leptotrichia sp., preferably Leptotrichia wadei F0279, or a Listeria sp., preferably Listeria newyorkensis FSL M6-0635.

[0665] In certain embodiments, the effector protein may be a Type VI loci effector protein, more particularly a Cas13cp, and the crRNA sequence may be 36 to 63 nucleotides in length, preferably 37-nt to 62-nt in length, or 38-nt to 61-nt in length, or 39-nt to 60-nt in length, more preferably 40-nt to 59-nt in length, or 41-nt to 58-nt in length, most preferably 42-nt to 57-nt in length. For example, the crRNA may comprise, consist essentially of or consist of a direct repeat (DR), preferably a 5′ DR, 26-nt to 31-nt in length, preferably 27-nt to 30-nt in length, even more preferably 28-nt or 29-nt in length or at least 28 or 29 nt in length, and a spacer 10-nt to 32-nt in length, preferably 11-nt to 31-nt in length, more preferably 12-nt to 30-nt in length, even more preferably 13-nt to 29-nt in length, and most preferably 14-nt to 28-nt in length, such as 18-28 nt, 19-28 nt, 20-28 nt, 21-28 nt, or 22-28 nt.

[0666] In certain embodiments, the effector protein may be a Type VI loci effector protein, more particularly a Cas13cp, and the tracrRNA sequence (if present) may be at least 60-nt long, such as at least 65-nt in length, or at least 70-nt in length, such as from 60-nt to 70-nt in length, or from 60-nt to 70-nt in length, or from 70-nt to 80-nt in length, or from 80-nt to 90-nt in length, or from 90-nt to 100-nt in length, or from 100-nt to 110-nt in length, or from 110-nt to 120-nt in length, or from 120-nt to 130-nt in length, or from 130-nt to 140-nt in length, or from 140-nt to 150-nt in length, or more than 150-nt in length.

[0667] In certain embodiments, the effector protein may be a Type VI loci effector protein, more particularly a Cas13cp, and no tracrRNA may be required for cleavage.

[0668] The use of two different aptamers (each associated with a distinct nucleic acid-targeting guide RNAs) allows an activator-adaptor protein fusion and a repressor-adaptor protein fusion to be used, with different nucleic acid-targeting guide RNAs, to activate expression of one DNA or RNA, whilst repressing another. They, along with their different guide RNAs can be administered together, or substantially together, in a multiplexed approach. A large number of such modified nucleic acid-targeting guide RNAs can be used all at the same time, for example 10 or 20 or 30 and so forth, whilst only one (or at least a minimal number) of effector protein molecules need to be delivered, as a comparatively small number of effector protein molecules can be used with a large number modified guides. The adaptor protein may be associated (preferably linked or fused to) one or more activators or one or more repressors. For example, the adaptor protein may be associated with a first activator and a second activator. The first and second activators may be the same, but they are preferably different activators. Three or more or even four or more activators (or repressors) may be used, but package size may limit the number being higher than 5 different functional domains. Linkers are preferably used, over a direct fusion to the adaptor protein, where two or more functional domains are associated with the adaptor protein. Suitable linkers might include the GlySer linker.

[0669] It is also envisaged that the nucleic acid-targeting effector protein-guide RNA complex as a whole may be associated with two or more functional domains. For example, there may be two or more functional domains associated with the nucleic acid-targeting effector protein, or there may be two or more functional domains associated with the guide RNA (via one or more adaptor proteins), or there may be one or more functional domains associated with the nucleic acid-targeting effector protein and one or more functional domains associated with the guide RNA (via one or more adaptor proteins).

[0670] The fusion between the adaptor protein and the activator or repressor may include a linker. For example, GlySer linkers GGGS can be used. They can be used in repeats of 3 ((GGGGS)₃) or 6, 9 or even 12 or more, to provide suitable lengths, as required. Linkers can be used between the guide RNAs and the functional domain (activator or repressor), or between the nucleic acid-targeting effector protein and the functional domain (activator or repressor). The linkers the user to engineer appropriate amounts of “mechanical flexibility”.

[0671] The invention comprehends a nucleic acid-targeting complex comprising a nucleic acid-targeting effector protein and a guide RNA, wherein the nucleic acid-targeting effector protein comprises at least one mutation, such that the nucleic acid-targeting Cas protein has no more than 5% of the activity of the nucleic acid-targeting Cas protein not having the at least one mutation and, optionally, at least one or more nuclear localization sequences; the guide RNA comprises a guide sequence capable of hybridizing to a target sequence in a RNA of interest in a cell; and wherein: the nucleic acid-targeting effector protein is associated with two or more functional domains; or at least one loop of the guide RNA is modified by the insertion of distinct RNA sequence(s) that bind to one or more adaptor proteins, and wherein the adaptor protein is associated with two or more functional domains; or the nucleic acid-targeting effector protein is associated with one or more functional domains and at least one loop of the guide RNA is modified by the insertion of distinct RNA sequence(s) that bind to one or more adaptor proteins, and wherein the adaptor protein is associated with one or more functional domains.

### Delivery Generally

### Cas13c Effector Protein Complexes can Deliver Functional Effectors

[0672] Unlike CRISPR-Cas-mediated gene knockout, which permanently eliminates expression by mutating the gene at the DNA level, CRISPR-Cas knockdown allows for temporary reduction of gene expression through the use of artificial transcription or translation factors. Mutating key residues in both DNA or RNA cleavage domains of the Cas13c protein results in the generation of a catalytically inactive Cas13c. A catalytically inactive Cas13c complexes with a guide RNA and localizes to the or RNA sequence specified by that guide RNA's targeting domain, however, it does not cleave the target RNA. Fusion of the inactive Cas13c protein to an effector domain, e.g., a transcription or translation repression domain, enables recruitment of the effector to any or RNA site specified by the guide RNA. In certain embodiments, Cas13c may be fused to a transcriptional repression domain and recruited to the promoter region of a gene. Especially for gene repression, it is contemplated herein that blocking the binding site of an endogenous transcription factor would aid in downregulating gene expression. In another embodiment, an inactive Cas13c can be fused to a chromatin modifying protein. Altering chromatin status can result in decreased expression of the target gene. In further embodiments, Cas13c may be fused to a translation repression domain.

[0673] In an embodiment, a guide RNA molecule can be targeted to a known transcription response elements (e.g., promoters, enhancers, etc.), a known upstream activating sequences, and/or sequences of unknown or known function that are suspected of being able to control (protein) expression of the target RNA.

[0674] In some methods, a target polynucleotide can be inactivated to effect the modification of the expression in a cell. For example, upon the binding of a CRISPR complex to a target sequence in a cell, the target polynucleotide is inactivated such that the sequence is not transcribed, the coded protein is not produced, or the sequence does not function as the wild-type sequence does. For example, a protein or microRNA coding sequence may be inactivated such that the protein is not produced. In some methods, a target polynucleotide can be inactivated to effect the modification of the expression in a cell. For example, upon the binding of a CRISPR complex to an RNA target sequence in a cell, the target polynucleotide is inactivated such that the sequence is not translated, affecting the expression level of the protein in the cell.

[0675] In particular embodiments, the CRISPR enzyme comprises one or more mutations selected from the group consisting of R597A, H602A, R1278A and H1283A and/or the one or more mutations are in the HEPN domain of the CRISPR enzyme or is a mutation as otherwise discussed herein. In some embodiments, the CRISPR enzyme has one or more mutations in a catalytic domain, wherein when transcribed, the direct repeat sequence forms a single stem loop and the guide sequence directs sequence-specific binding of a CRISPR complex to the target sequence, and wherein the enzyme further comprises a functional domain. In some embodiments, the functional domain is a. In some embodiments, the functional domain is a transcription repression domain, preferably KRAB. In some embodiments, the transcription repression domain is SID, or concatemers of SID (eg SID4X). In some embodiments, the functional domain is an epigenetic modifying domain, such that an epigenetic modifying enzyme is provided. In some embodiments, the functional domain is an activation domain, which may be the P65 activation domain.

### Delivery of the Cas13c Effector Protein Complex or Components Thereof

[0676] Through this disclosure and the knowledge in the art, TALEs, CRISPR-Cas systems, or components thereof or nucleic acid molecules thereof or nucleic acid molecules encoding or providing components thereof may be delivered by a delivery system herein described both generally and in detail.

[0677] Vector delivery, e.g., plasmid, viral delivery: The CRISPR enzyme, for instance a Type V protein such as Cas13c, and/or any of the present RNAs, for instance a guide RNA, can be delivered using any suitable vector, e.g., plasmid or viral vectors, such as adeno associated virus (AAV), lentivirus, adenovirus or other viral vector types, or combinations thereof. Effector proteins and one or more guide RNAs can be packaged into one or more vectors, e.g., plasmid or viral vectors. In some embodiments, the vector, e.g., plasmid or viral vector is delivered to the tissue of interest by, for example, an intramuscular injection, while other times the delivery is via intravenous, transdermal, intranasal, oral, mucosal, or other delivery methods. Such delivery may be either via a single dose, or multiple doses. One skilled in the art understands that the actual dosage to be delivered herein may vary greatly depending upon a variety of factors, such as the vector choice, the target cell, organism, or tissue, the general condition of the subject to be treated, the degree of transformation/modification sought, the administration route, the administration mode, the type of transformation/modification sought, etc.

[0678] Such a dosage may further contain, for example, a carrier (water, saline, ethanol, glycerol, lactose, sucrose, calcium phosphate, gelatin, dextran, agar, pectin, peanut oil, sesame oil, etc.), a diluent, a pharmaceutically-acceptable carrier (e.g., phosphate-buffered saline), a pharmaceutically-acceptable excipient, and/or other compounds known in the art. The dosage may further contain one or more pharmaceutically acceptable salts such as, for example, a mineral acid salt such as a hydrochloride, a hydrobromide, a phosphate, a sulfate, etc.; and the salts of organic acids such as acetates, propionates, malonates, benzoates, etc. Additionally, auxiliary substances, such as wetting or emulsifying agents, pH buffering substances, gels or gelling materials, flavorings, colorants, microspheres, polymers, suspension agents, etc. may also be present herein. In addition, one or more other conventional pharmaceutical ingredients, such as preservatives, humectants, suspending agents, surfactants, antioxidants, anticaking agents, fillers, chelating agents, coating agents, chemical stabilizers, etc. may also be present, especially if the dosage form is a reconstitutable form. Suitable exemplary ingredients include microcrystalline cellulose, carboxymethylcellulose sodium, polysorbate 80, phenylethyl alcohol, chlorobutanol, potassium sorbate, sorbic acid, sulfur dioxide, propyl gallate, the parabens, ethyl vanillin, glycerin, phenol, parachlorophenol, gelatin, albumin and a combination thereof. A thorough discussion of pharmaceutically acceptable excipients is available in REMINGTON'S PHARMACEUTICAL SCIENCES (Mack Pub. Co., N.J. 1991) which is incorporated by reference herein.

[0679] In an embodiment herein the delivery is via an adenovirus, which may be at a single booster dose containing at least 1×10⁵ particles (also referred to as particle units, pu) of adenoviral vector. In an embodiment herein, the dose preferably is at least about 1×10⁶ particles (for example, about 1×10⁶-1×10¹² particles), more preferably at least about 1×10′ particles, more preferably at least about 1×10⁸ particles (e.g., about 1×10⁸-1×10¹¹ particles or about 1×10⁸-1×10¹² particles), and most preferably at least about 1×10° particles (e.g., about 1×10⁹-1×10¹⁰ particles or about 1×10⁹-1×10¹² particles), or even at least about 1×10¹⁰ particles (e.g., about 1×10¹⁰-1×10¹² particles) of the adenoviral vector. Alternatively, the dose comprises no more than about 1×10¹⁴ particles, preferably no more than about 1×10¹³ particles, even more preferably no more than about 1×10¹² particles, even more preferably no more than about 1×10¹¹ particles, and most preferably no more than about 1×10¹⁰ particles (e.g., no more than about 1×10⁹ articles). Thus, the dose may contain a single dose of adenoviral vector with, for example, about 1×10⁶ particle units (pu), about 2×10⁶ pu, about 4×10⁶ pu, about 1×10′ pu, about 2×10′ pu, about 4×10⁷ pu, about 1×10⁸ pu, about 2×10⁸ pu, about 4×10⁸ pu, about 1×10⁹ pu, about 2×10⁹ pu, about 4×10⁹ pu, about 1×10¹⁰ pu, about 2×10¹⁰ pu, about 4×10¹⁰ pu, about 1×10¹¹ pu, about 2×10¹¹ pu, about 4×10¹¹ pu, about 1×10¹² pu, about 2×10¹² pu, or about 4×10¹² pu of adenoviral vector. See, for example, the adenoviral vectors in U.S. Pat. No. 8,454,972 B2 to Nabel, et. al., granted on Jun. 4, 2013; incorporated by reference herein, and the dosages at col 29, lines 36-58 thereof. In an embodiment herein, the adenovirus is delivered via multiple doses.

[0680] In an embodiment herein, the delivery is via an AAV. A therapeutically effective dosage for in vivo delivery of the AAV to a human is believed to be in the range of from about 20 to about 50 ml of saline solution containing from about 1×10¹⁰ to about 1×10¹⁰ functional AAV/ml solution. The dosage may be adjusted to balance the therapeutic benefit against any side effects. In an embodiment herein, the AAV dose is generally in the range of concentrations of from about 1×10⁵ to 1×10⁵⁰ genomes AAV, from about 1×10⁸ to 1×10²⁰ genomes AAV, from about 1×10¹⁰ to about 1×10¹⁶ genomes, or about 1×10¹¹ to about 1×10¹⁶ genomes AAV. A human dosage may be about 1×10¹³ genomes AAV. Such concentrations may be delivered in from about 0.001 ml to about 100 ml, about 0.05 to about 50 ml, or about 10 to about 25 ml of a carrier solution. Other effective dosages can be readily established by one of ordinary skill in the art through routine trials establishing dose response curves. See, for example, U.S. Pat. No. 8,404,658 B2 to Hajjar, et al., granted on Mar. 26, 2013, at col. 27, lines 45-60.

[0681] In an embodiment herein the delivery is via a plasmid. In such plasmid compositions, the dosage should be a sufficient amount of plasmid to elicit a response. For instance, suitable quantities of plasmid DNA in plasmid compositions can be from about 0.1 to about 2 mg, or from about 1 μg to about 10 μg per 70 kg individual. Plasmids of the invention will generally comprise (i) a promoter; (ii) a sequence encoding an nucleic acid-targeting CRISPR enzyme, operably linked to said promoter; (iii) a selectable marker; (iv) an origin of replication; and (v) a transcription terminator downstream of and operably linked to (ii). The plasmid can also encode the RNA components of a CRISPR complex, but one or more of these may instead be encoded on a different vector.

[0682] The doses herein are based on an average 70 kg individual. The frequency of administration is within the ambit of the medical or veterinary practitioner (e.g., physician, veterinarian), or scientist skilled in the art. It is also noted that mice used in experiments are typically about 20 g and from mice experiments one can scale up to a 70 kg individual.

[0683] In some embodiments the RNA molecules of the invention are delivered in liposome or lipofectin formulations and the like and can be prepared by methods well known to those skilled in the art. Such methods are described, for example, in U.S. Pat. Nos. 5,593,972, 5,589,466, and 5,580,859, which are herein incorporated by reference. Delivery systems aimed specifically at the enhanced and improved delivery of siRNA into mammalian cells have been developed, (see, for example, Shen et al FEBS Let. 2003, 539:111-114; Xia et al., Nat. Biotech. 2002, 20:1006-1010; Reich et al., Mol. Vision. 2003, 9: 210-216; Sorensen et al., J. Mol. Biol. 2003, 327: 761-766; Lewis et al., Nat. Gen. 2002, 32: 107-108 and Simeoni et al., NAR 2003, 31, 11: 2717-2724) and may be applied to the present invention. siRNA has recently been successfully used for inhibition of gene expression in primates (see for example. Tolentino et al., Retina 24(4):660 which may also be applied to the present invention.

[0684] Indeed, RNA delivery is a useful method of in vivo delivery. It is possible to deliver nucleic acid-targeting Cas proteinCas9 and guide RNAgRNA (and, for instance, HR repair template) into cells using liposomes or particles. Thus delivery of the nucleic acid-targeting Cas protein/CRISPR enzyme, such as a CasCas9 and/or delivery of the guide RNAs of the invention may be in RNA form and via microvesicles, liposomes or particles. For example, Cas mRNA and guide RNA can be packaged into liposomal particles for delivery in vivo. Liposomal transfection reagents such as lipofectamine from Life Technologies and other reagents on the market can effectively deliver RNA molecules into the liver.

[0685] Means of delivery of RNA also preferred include delivery of RNA via nanoparticles (Cho, S., Goldberg, M., Son, S., Xu, Q., Yang, F., Mei, Y., Bogatyrev, S., Langer, R. and Anderson, D., Lipid-like nanoparticles for small interfering RNA delivery to endothelial cells, Advanced Functional Materials, 19: 3112-3118, 2010) or exosomes (Schroeder, A., Levins, C., Cortez, C., Langer, R., and Anderson, D., Lipid-based nanotherapeutics for siRNA delivery, Journal of Internal Medicine, 267: 9-21, 2010, PMID: 20059641). Indeed, exosomes have been shown to be particularly useful in delivery siRNA, a system with some parallels to the RNA-targeting system. For instance, El-Andaloussi S, et al. (“Exosome-mediated delivery of siRNA in vitro and in vivo.” Nat Protoc. 2012 December; 7(12):2112-26. doi: 10.1038/nprot.2012.131. Epub 2012 Nov. 15) describe how exosomes are promising tools for drug delivery across different biological barriers and can be harnessed for delivery of siRNA in vitro and in vivo. Their approach is to generate targeted exosomes through transfection of an expression vector, comprising an exosomal protein fused with a peptide ligand. The exosomes are then purify and characterized from transfected cell supernatant, then RNA is loaded into the exosomes. Delivery or administration according to the invention can be performed with exosomes, in particular but not limited to the brain. Vitamin E (α-tocopherol) may be conjugated with nucleic acid-targeting Cas protein and delivered to the brain along with high density lipoprotein (HDL), for example in a similar manner as was done by Uno et al. (HUMAN GENE THERAPY 22:711-719 (June 2011)) for delivering short-interfering RNA (siRNA) to the brain. Mice were infused via Osmotic minipumps (model 1007D; Alzet, Cupertino, Calif.) filled with phosphate-buffered saline (PBS) or free TocsiBACE or Toc-siBACE/HDL and connected with Brain Infusion Kit 3 (Alzet). A brain-infusion cannula was placed about 0.5 mm posterior to the bregma at midline for infusion into the dorsal third ventricle. Uno et al. found that as little as 3 nmol of Toc-siRNA with HDL could induce a target reduction in comparable degree by the same ICV infusion method. A similar dosage of nucleic acid-targeting effector protein conjugated to α-tocopherol and co-administered with HDL targeted to the brain may be contemplated for humans in the present invention, for example, about 3 nmol to about 3 μmol of nucleic acid-targeting effector protein targeted to the brain may be contemplated. Zou et al. ((HUMAN GENE THERAPY 22:465-475 (April 2011)) describes a method of lentiviral-mediated delivery of short-hairpin RNAs targeting PKCγ for in vivo gene silencing in the spinal cord of rats. Zou et al. administered about 10 μl of a recombinant lentivirus having a titer of 1×10⁹ transducing units (TU)/ml by an intrathecal catheter. A similar dosage of nucleic acid-targeting effector protein expressed in a lentiviral vector targeted to the brain may be contemplated for humans in the present invention, for example, about 10-50 ml of nucleic acid-targeting effector protein targeted to the brain in a lentivirus having a titer of 1×10⁹ transducing units (TU)/ml may be contemplated.

[0686] In terms of local delivery to the brain, this can be achieved in various ways. For instance, material can be delivered intrastriatally e.g., by injection. Injection can be performed stereotactically via a craniotomy.

### Packaging and Promoters Generally

[0687] Ways to package nucleic acid-targeting effector coding nucleic acid molecules, e.g., DNA, into vectors, e.g., viral vectors, to mediate genome modification in vivo include:
[0688] To achieve NHEJ-mediated gene knockout:
[0689] Single virus vector:
   [0690] Vector containing two or more expression cassettes:
   [0691] Promoter-nucleic acid-targeting effector protein coding nucleic acid molecule-terminator
   [0692] Promoter-guide RNA1-terminator
   [0693] Promoter-guide RNA (N)-terminator (up to size limit of vector)
[0694] Double virus vector:
   [0695] Vector 1 containing one expression cassette for driving the expression of nucleic acid-targeting effector protein
   [0696] Promoter-nucleic acid-targeting effector protein coding nucleic acid molecule-terminator
   [0697] Vector 2 containing one more expression cassettes for driving the expression of one or more guideRNAs
   [0698] Promoter-guide RNA1-terminator
   [0699] Promoter-guide RNA1 (N)-terminator (up to size limit of vector)

[0700] To mediate homology-directed repair.

[0701] In addition to the single and double virus vector approaches described above, an additional vector is used to deliver a homology-direct repair template.

[0702] The promoter used to drive nucleic acid-targeting effector protein coding nucleic acid molecule expression can include:

[0703] AAV ITR can serve as a promoter: this is advantageous for eliminating the need for an additional promoter element (which can take up space in the vector). The additional space freed up can be used to drive the expression of additional elements (gRNA, etc.). Also, ITR activity is relatively weaker, so can be used to reduce potential toxicity due to over expression of nucleic acid-targeting effector protein.

[0704] For ubiquitous expression, can use promoters: CMV, CAG, CBh, PGK, SV40, Ferritin heavy or light chains, etc.

[0705] For brain or other CNS expression, can use promoters: Synapsinl for all neurons, CaMKIIalpha for excitatory neurons, GAD67 or GAD65 or VGAT for GABAergic neurons, etc.

[0706] For liver expression, can use Albumin promoter.

[0707] For lung expression, can use SP-B.

[0708] For endothelial cells, can use ICAM.

[0709] For hematopoietic cells can use IFNbeta or CD45.

[0710] For Osteoblasts can use OG-2.

[0711] The promoter used to drive guide RNA can include:

[0712] Pol III promoters such as U6 or H1

[0713] Use of Pol II promoter and intronic cassettes to express guide RNA

### Adeno Associated Virus (AAV)

[0714] nucleic acid-targeting effector protein and one or more guide RNA can be delivered using adeno associated virus (AAV), lentivirus, adenovirus or other plasmid or viral vector types, in particular, using formulations and doses from, for example, U.S. Pat. No. 8,454,972 (formulations, doses for adenovirus), U.S. Pat. No. 8,404,658 (formulations, doses for AAV) and U.S. Pat. No. 5,846,946 (formulations, doses for DNA plasmids) and from clinical trials and publications regarding the clinical trials involving lentivirus, AAV and adenovirus. For examples, for AAV, the route of administration, formulation and dose can be as in U.S. Pat. No. 8,454,972 and as in clinical trials involving AAV. For Adenovirus, the route of administration, formulation and dose can be as in U.S. Pat. No. 8,404,658 and as in clinical trials involving adenovirus. For plasmid delivery, the route of administration, formulation and dose can be as in U.S. Pat. No. 5,846,946 and as in clinical studies involving plasmids. Doses may be based on or extrapolated to an average 70 kg individual (e.g., a male adult human), and can be adjusted for patients, subjects, mammals of different weight and species. Frequency of administration is within the ambit of the medical or veterinary practitioner (e.g., physician, veterinarian), depending on usual factors including the age, sex, general health, other conditions of the patient or subject and the particular condition or symptoms being addressed. The viral vectors can be injected into the tissue of interest. For cell-type specific genome/transcriptome modification, the expression of nucleic acid-targeting effector protein can be driven by a cell-type specific promoter. For example, liver-specific expression might use the Albumin promoter and neuron-specific expression (e.g., for targeting CNS disorders) might use the Synapsin I promoter.

[0715] In terms of in vivo delivery, AAV is advantageous over other viral vectors for a couple of reasons:
[0716] Low toxicity (this may be due to the purification method not requiring ultra centrifugation of cell particles that can activate the immune response) and
[0717] Low probability of causing insertional mutagenesis because it doesn't integrate into the host genome.

[0718] AAV has a packaging limit of 4.5 or 4.75 Kb. This means that nucleic acid-targeting effector protein (such as a Type V protein such as Cas13c) as well as a promoter and transcription terminator have to be all fit into the same viral vector. Therefore embodiments of the invention include utilizing homologs of nucleic acid-targeting effector protein that are shorter.

[0719] As to AAV, the AAV can be AAV1, AAV2, AAV5 or any combination thereof. One can select the AAV of the AAV with regard to the cells to be targeted; e.g., one can select AAV serotypes 1, 2, 5 or a hybrid capsid AAV1, AAV2, AAV5 or any combination thereof for targeting brain or neuronal cells; and one can select AAV4 for targeting cardiac tissue. AAV8 is useful for delivery to the liver. The herein promoters and vectors are preferred individually. A tabulation of certain AAV serotypes as to these cells (see Grimm, D. et al, J. Virol. 82: 5887-5911 (2008)) is as follows:

| Cell Line | AAV-1 | AAV-2 | AAV-3 | AAV-4 | AAV-5 | AAV-6 | AAV-8 | AAV-9 |
|---|---|---|---|---|---|---|---|---|
| Huh-7 | 13 | 100 | 2.5 | 0.0 | 0.1 | 10 | 0.7 | 0.0 |
| HEK293 | 25 | 100 | 2.5 | 0.1 | 0.1 | 5 | 0.7 | 0.1 |
| HeLa | 3 | 100 | 2.0 | 0.1 | 6.7 | 1 | 0.2 | 0.1 |
| HepG2 | 3 | 100 | 16.7 | 0.3 | 1.7 | 5 | 0.3 | ND |
| Hep1A | 20 | 100 | 0.2 | 1.0 | 0.1 | 1 | 0.2 | 0.0 |
| 911 | 17 | 100 | 11 | 0.2 | 0.1 | 17 | 0.1 | ND |
| CHO | 100 | 100 | 14 | 1.4 | 333 | 50 | 10 | 1.0 |
| COS | 33 | 100 | 33 | 3.3 | 5.0 | 14 | 2.0 | 0.5 |
| MeWo | 10 | 100 | 20 | 0.3 | 6.7 | 10 | 1.0 | 0.2 |
| NIH3T3 | 10 | 100 | 2.9 | 2.9 | 0.3 | 10 | 0.3 | ND |
| A549 | 14 | 100 | 20 | ND | 0.5 | 10 | 0.5 | 0.1 |
| HT1180 | 20 | 100 | 10 | 0.1 | 0.3 | 33 | 0.5 | 0.1 |
| Monocytes | 1111 | 100 | ND | ND | 125 | 1429 | ND | ND |
| Immature DC | 2500 | 100 | ND | ND | 222 | 2857 | ND | ND |
| Mature DC | 2222 | 100 | ND | ND | 333 | 3333 | ND | ND |

### Lentivirus

[0720] Lentiviruses are complex retroviruses that have the ability to infect and express their genes in both mitotic and post-mitotic cells. The most commonly known lentivirus is the human immunodeficiency virus (HIV), which uses the envelope glycoproteins of other viruses to target a broad range of cell types.

[0721] Lentiviruses may be prepared as follows. After cloning pCasES10 (which contains a lentiviral transfer plasmid backbone), HEK293FT at low passage (p=5) were seeded in a T-75 flask to 50% confluence the day before transfection in DMEM with 10% fetal bovine serum and without antibiotics. After 20 hours, media was changed to OptiMEM (serum-free) media and transfection was done 4 hours later. Cells were transfected with 10 μg of lentiviral transfer plasmid (pCasES10) and the following packaging plasmids: 5 μg of pMD2.G (VSV-g pseudotype), and 7.5 ug of psPAX2 (gag/pol/rev/tat). Transfection was done in 4 mL OptiMEM with a cationic lipid delivery agent (50 uL Lipofectamine 2000 and 100 ul Plus reagent). After 6 hours, the media was changed to antibiotic-free DMEM with 10% fetal bovine serum. These methods use serum during cell culture, but serum-free methods are preferred.

[0722] Lentivirus may be purified as follows. Viral supernatants were harvested after 48 hours. Supernatants were first cleared of debris and filtered through a 0.45 um low protein binding (PVDF) filter. They were then spun in a ultracentrifuge for 2 hours at 24,000 rpm. Viral pellets were resuspended in 50 ul of DMEM overnight at 4 C. They were then aliquoted and immediately frozen at −80° C.

[0723] In another embodiment, minimal non-primate lentiviral vectors based on the equine infectious anemia virus (EIAV) are also contemplated, especially for ocular gene therapy (see, e.g., Balagaan, J Gene Med 2006; 8: 275-285). In another embodiment, RetinoStat®, an equine inffctious anemia virus-based lentiviral gene therapy vector that expresses angiostatic proteins endostatin and angiostatin that is delivered via a subretinal injection for the treatment of the web form of age-related macular degeneration is also contemplated (see, e.g., Binley et al., HUMAN GENE THERAPY 23:980-991 (September 2012)) and this vector may be modified for the nucleic acid-targeting system of the present invention.

[0724] In another embodiment, self-inactivating lentiviral vectors with an siRNA targeting a common exon shared by HIV tat/rev, a nucleolar-localizing TAR decoy, and an anti-CCR5-specific hammerhead ribozyme (see, e.g., DiGiusto et al. (2010) Sci Transl Med 2:36ra43) may be used/and or adapted to the nucleic acid-targeting system of the present invention. A minimum of 2.5×10⁶ CD34+ cells per kilogram patient weight may be collected and prestimulated for 16 to 20 hours in X-VIVO 15 medium (Lonza) containing 2 μmol/L-glutamine, stem cell factor (100 ng/ml), Flt-3 ligand (Flt-3L) (100 ng/ml), and thrombopoietin (10 ng/ml) (CellGenix) at a density of 2×10⁶ cells/ml. Prestimulated cells may be transduced with lentiviral at a multiplicity of infection of 5 for 16 to 24 hours in 75-cm² tissue culture flasks coated with fibronectin (25 mg/cm′) (RetroNectin, Takara Bio Inc.).

[0725] Lentiviral vectors have been disclosed as in the treatment for Parkinson's Disease, see, e.g., US Patent Publication No. 20120295960 and U.S. Pat. Nos. 7,303,910 and 7,351,585. Lentiviral vectors have also been disclosed for the treatment of ocular diseases, see e.g., US Patent Publication Nos. 20060281180, 20090007284, US20110117189; US20090017543; US20070054961, US20100317109. Lentiviral vectors have also been disclosed for delivery to the brain, see, e.g., US Patent Publication Nos. US20110293571; US20110293571, US20040013648, US20070025970, US20090111106 and U.S. Pat. No. 7,259,015.

### RNA Delivery

[0726] RNA delivery: The nucleic acid-targeting Cas protein, for instance a Type V protein such as Cas13c, and/or guide RNA, can also be delivered in the form of RNA. nucleic acid-targeting Cas protein (such as a Type VI protein such as Cas13c) mRNA can be generated using in vitro transcription. For example, nucleic acid-targeting effector protein (such as a Type V protein such as Cas13c) mRNA can be synthesized using a PCR cassette containing the following elements: T7_promoter-kozak sequence (GCCACC)-effector protrein-3′ UTR from beta globin-polyA tail (a string of 120 or more adenines). The cassette can be used for transcription by T7 polymerase. Guide RNAs can also be transcribed using in vitro transcription from a cassette containing T7_promoter-GG-guide RNA sequence.

[0727] To enhance expression and reduce possible toxicity, the nucleic acid-targeting effector protein-coding sequence and/or the guide RNA can be modified to include one or more modified nucleoside e.g., using pseudo-U or 5-Methyl-C.

[0728] mRNA delivery methods are especially promising for liver delivery currently.

[0729] Much clinical work on RNA delivery has focused on RNAi or antisense, but these systems can be adapted for delivery of RNA for implementing the present invention. References below to RNAi etc. should be read accordingly.

Particle Delivery Systems and/or Formulations:

[0730] Several types of particle delivery systems and/or formulations are known to be useful in a diverse spectrum of biomedical applications. In general, a particle is defined as a small object that behaves as a whole unit with respect to its transport and properties. Particles are further classified according to diameter. Coarse particles cover a range between 2,500 and 10,000 nanometers. Fine particles are sized between 100 and 2,500 nanometers. Ultrafine particles, or nanoparticles, are generally between 1 and 100 nanometers in size. The basis of the 100-nm limit is the fact that novel properties that differentiate particles from the bulk material typically develop at a critical length scale of under 100 nm.

[0731] As used herein, a particle delivery system/formulation is defined as any biological delivery system/formulation which includes a particle in accordance with the present invention. A particle in accordance with the present invention is any entity having a greatest dimension (e.g. diameter) of less than 100 microns (μm). In some embodiments, inventive particles have a greatest dimension of less than 10 μm. In some embodiments, inventive particles have a greatest dimension of less than 2000 nanometers (nm). In some embodiments, inventive particles have a greatest dimension of less than 1000 nanometers (nm). In some embodiments, inventive particles have a greatest dimension of less than 900 nm, 800 nm, 700 nm, 600 nm, 500 nm, 400 nm, 300 nm, 200 nm, or 100 nm. Typically, inventive particles have a greatest dimension (e.g., diameter) of 500 nm or less. In some embodiments, inventive particles have a greatest dimension (e.g., diameter) of 250 nm or less. In some embodiments, inventive particles have a greatest dimension (e.g., diameter) of 200 nm or less. In some embodiments, inventive particles have a greatest dimension (e.g., diameter) of 150 nm or less. In some embodiments, inventive particles have a greatest dimension (e.g., diameter) of 100 nm or less. Smaller particles, e.g., having a greatest dimension of 50 nm or less are used in some embodiments of the invention. In some embodiments, inventive particles have a greatest dimension ranging between 25 nm and 200 nm.

[0732] Particle characterization (including e.g., characterizing morphology, dimension, etc.) is done using a variety of different techniques. Common techniques are electron microscopy (TEM, SEM), atomic force microscopy (AFM), dynamic light scattering (DLS), X-ray photoelectron spectroscopy (XPS), powder X-ray diffraction (XRD), Fourier transform infrared spectroscopy (FTIR), matrix-assisted laser desorption/ionization time-of-flight mass spectrometry (MALDI-TOF), ultraviolet-visible spectroscopy, dual polarisation interferometry and nuclear magnetic resonance (NMR). Characterization (dimension measurements) may be made as to native particles (i.e., preloading) or after loading of the cargo (herein cargo refers to e.g., one or more components of CRISPR-Cas system e.g., CRISPR enzyme or mRNA or guide RNA, or any combination thereof, and may include additional carriers and/or excipients) to provide particles of an optimal size for delivery for any in vitro, ex vivo and/or in vivo application of the present invention. In certain preferred embodiments, particle dimension (e.g., diameter) characterization is based on measurements using dynamic laser scattering (DLS). Mention is made of U.S. Pat. Nos. 8,709,843; 6,007,845; 5,855,913; 5,985,309; 5,543,158; and the publication by James E. Dahlman and Carmen Barnes et al. Nature Nanotechnology (2014) published online 11 May 2014, doi:10.1038/nnano.2014.84, concerning particles, methods of making and using them and measurements thereof.

[0733] Particles delivery systems within the scope of the present invention may be provided in any form, including but not limited to solid, semi-solid, emulsion, or colloidal particles. As such any of the delivery systems described herein, including but not limited to, e.g., lipid-based systems, liposomes, micelles, microvesicles, exosomes, or gene gun may be provided as particle delivery systems within the scope of the present invention.

### Particles

[0734] CRISPR enzyme mRNA and guide RNA may be delivered simultaneously using particles or lipid envelopes; for instance, CRISPR enzyme and RNA of the invention, e.g., as a complex, can be delivered via a particle as in Dahlman et al., WO2015089419 A2 and documents cited therein, such as 7C1 (see, e.g., James E. Dahlman and Carmen Barnes et al. Nature Nanotechnology (2014) published online 11 May 2014, doi:10.1038/nnano.2014.84), e.g., delivery particle comprising lipid or lipidoid and hydrophilic polymer, e.g., cationic lipid and hydrophilic polymer, for instance wherein the the cationic lipid comprises 1,2-dioleoyl-3-trimethylammonium-propane (DOTAP) or 1,2-ditetradecanoyl-sn-glycero-3-phosphocholine (DMPC) and/or wherein the hydrophilic polymer comprises ethylene glycol or polyethylene glycol (PEG); and/or wherein the particle further comprises cholesterol (e.g., particle from formulation 1=DOTAP 100, DMPC 0, PEG 0, Cholesterol 0; formulation number 2=DOTAP 90, DMPC 0, PEG 10, Cholesterol 0; formulation number 3=DOTAP 90, DMPC 0, PEG 5, Cholesterol 5), wherein particles are formed using an efficient, multistep process wherein first, effector protein and RNA are mixed together, e.g., at a 1:1 molar ratio, e.g., at room temperature, e.g., for 30 minutes, e.g., in sterile, nuclease free 1X PBS; and separately, DOTAP, DMPC, PEG, and cholesterol as applicable for the formulation are dissolved in alcohol, e.g., 100% ethanol; and, the two solutions are mixed together to form particles containing the complexes).

[0735] Nucleic acid-targeting effector proteins (such as a Type VI protein such as Cas13c) mRNA and guide RNA may be delivered simultaneously using particles or lipid envelopes.

[0736] For example, Su X, Fricke J, Kavanagh D G, Irvine D J (“In vitro and in vivo mRNA delivery using lipid-enveloped pH-responsive polymer nanoparticles” Mol Pharm. 2011 Jun. 6; 8(3):774-87. doi: 10.1021/mp100390w. Epub 2011 Apr. 1) describes biodegradable core-shell structured particles with a poly(β-amino ester) (PBAE) core enveloped by a phospholipid bilayer shell. These were developed for in vivo mRNA delivery. The pH-responsive PBAE component was chosen to promote endosome disruption, while the lipid surface layer was selected to minimize toxicity of the polycation core. Such are, therefore, preferred for delivering RNA of the present invention.

[0737] In one embodiment, particles based on self-assembling bioadhesive polymers are contemplated, which may be applied to oral delivery of peptides, intravenous delivery of peptides and nasal delivery of peptides, all to the brain. Other embodiments, such as oral absorption and ocular delivery of hydrophobic drugs are also contemplated. The molecular envelope technology involves an engineered polymer envelope which is protected and delivered to the site of the disease (see, e.g., Mazza, M. et al. ACSNano, 2013. 7(2): 1016-1026; Siew, A., et al. Mol Pharm, 2012. 9(1):14-28; Lalatsa, A., et al. J Contr Rel, 2012. 161(2):523-36; Lalatsa, A., et al., Mol Pharm, 2012. 9(6):1665-80; Lalatsa, A., et al. Mol Pharm, 2012. 9(6):1764-74; Garrett, N. L., et al. J Biophotonics, 2012. 5(5-6):458-68; Garrett, N. L., et al. J Raman Spect, 2012. 43(5):681-688; Ahmad, S., et al. J Royal Soc Interface 2010. 7:S423-33; Uchegbu, I. F. Expert Opin Drug Deliv, 2006. 3(5):629-40; Qu, X., et al. Biomacromolecules, 2006. 7(12):3452-9 and Uchegbu, I. F., et al. Int J Pharm, 2001. 224:185-199). Doses of about 5 mg/kg are contemplated, with single or multiple doses, depending on the target tissue.

[0738] In one embodiment, particles that can deliver RNA to a cancer cell to stop tumor growth developed by Dan Anderson's lab at MIT may be used/and or adapted to the nucleic acid-targeting system of the present invention. In particular, the Anderson lab developed fully automated, combinatorial systems for the synthesis, purification, characterization, and formulation of new biomaterials and nanoformulations. See, e.g., Alabi et al., Proc Natl Acad Sci USA. 2013 Aug. 6; 110(32):12881-6; Zhang et al., Adv Mater. 2013 Sep. 6; 25(33):4641-5; Jiang et al., Nano Lett. 2013 Mar. 13; 13(3):1059-64; Karagiannis et al., ACS Nano. 2012 Oct. 23; 6(10):8484-7; Whitehead et al., ACS Nano. 2012 Aug. 28; 6(8):6922-9 and Lee et al., Nat Nanotechnol. 2012 Jun. 3; 7(6):389-93.

[0739] US patent application 20110293703 relates to lipidoid compounds are also particularly useful in the administration of polynucleotides, which may be applied to deliver the nucleic acid-targeting system of the present invention. In one aspect, the aminoalcohol lipidoid compounds are combined with an agent to be delivered to a cell or a subject to form microparticles, nanoparticles, liposomes, or micelles. The agent to be delivered by the particles, liposomes, or micelles may be in the form of a gas, liquid, or solid, and the agent may be a polynucleotide, protein, peptide, or small molecule. The minoalcohol lipidoid compounds may be combined with other aminoalcohol lipidoid compounds, polymers (synthetic or natural), surfactants, cholesterol, carbohydrates, proteins, lipids, etc. to form the particles. These particles may then optionally be combined with a pharmaceutical excipient to form a pharmaceutical composition.

[0740] US Patent Publication No. 20110293703 also provides methods of preparing the aminoalcohol lipidoid compounds. One or more equivalents of an amine are allowed to react with one or more equivalents of an epoxide-terminated compound under suitable conditions to form an aminoalcohol lipidoid compound of the present invention. In certain embodiments, all the amino groups of the amine are fully reacted with the epoxide-terminated compound to form tertiary amines. In other embodiments, all the amino groups of the amine are not fully reacted with the epoxide-terminated compound to form tertiary amines thereby resulting in primary or secondary amines in the aminoalcohol lipidoid compound. These primary or secondary amines are left as is or may be reacted with another electrophile such as a different epoxide-terminated compound. As will be appreciated by one skilled in the art, reacting an amine with less than excess of epoxide-terminated compound will result in a plurality of different aminoalcohol lipidoid compounds with various numbers of tails. Certain amines may be fully functionalized with two epoxide-derived compound tails while other molecules will not be completely functionalized with epoxide-derived compound tails. For example, a diamine or polyamine may include one, two, three, or four epoxide-derived compound tails off the various amino moieties of the molecule resulting in primary, secondary, and tertiary amines. In certain embodiments, all the amino groups are not fully functionalized. In certain embodiments, two of the same types of epoxide-terminated compounds are used. In other embodiments, two or more different epoxide-terminated compounds are used. The synthesis of the aminoalcohol lipidoid compounds is performed with or without solvent, and the synthesis may be performed at higher temperatures ranging from 30-100° C., preferably at approximately 50-90° C. The prepared aminoalcohol lipidoid compounds may be optionally purified. For example, the mixture of aminoalcohol lipidoid compounds may be purified to yield an aminoalcohol lipidoid compound with a particular number of epoxide-derived compound tails. Or the mixture may be purified to yield a particular stereo- or regioisomer. The aminoalcohol lipidoid compounds may also be alkylated using an alkyl halide (e.g., methyl iodide) or other alkylating agent, and/or they may be acylated.

[0741] US Patent Publication No. 20110293703 also provides libraries of aminoalcohol lipidoid compounds prepared by the inventive methods. These aminoalcohol lipidoid compounds may be prepared and/or screened using high-throughput techniques involving liquid handlers, robots, microtiter plates, computers, etc. In certain embodiments, the aminoalcohol lipidoid compounds are screened for their ability to transfect polynucleotides or other agents (e.g., proteins, peptides, small molecules) into the cell.

[0742] US Patent Publication No. 20130302401 relates to a class of poly(beta-amino alcohols) (PBAAs) has been prepared using combinatorial polymerization. The inventive PBAAs may be used in biotechnology and biomedical applications as coatings (such as coatings of films or multilayer films for medical devices or implants), additives, materials, excipients, non-biofouling agents, micropatterning agents, and cellular encapsulation agents. When used as surface coatings, these PBAAs elicited different levels of inflammation, both in vitro and in vivo, depending on their chemical structures. The large chemical diversity of this class of materials allowed us to identify polymer coatings that inhibit macrophage activation in vitro. Furthermore, these coatings reduce the recruitment of inflammatory cells, and reduce fibrosis, following the subcutaneous implantation of carboxylated polystyrene microparticles. These polymers may be used to form polyelectrolyte complex capsules for cell encapsulation. The invention may also have many other biological applications such as antimicrobial coatings, DNA or siRNA delivery, and stem cell tissue engineering. The teachings of US Patent Publication No. 20130302401 may be applied to the nucleic acid-targeting system of the present invention.

[0743] In another embodiment, lipid nanoparticles (LNPs) are contemplated. An antitransthyretin small interfering RNA has been encapsulated in lipid nanoparticles and delivered to humans (see, e.g., Coelho et al., N Engl J Med 2013; 369:819-29), and such a system may be adapted and applied to the nucleic acid-targeting system of the present invention. Doses of about 0.01 to about 1 mg per kg of body weight administered intravenously are contemplated. Medications to reduce the risk of infusion-related reactions are contemplated, such as dexamethasone, acetampinophen, diphenhydramine or cetirizine, and ranitidine are contemplated. Multiple doses of about 0.3 mg per kilogram every 4 weeks for five doses are also contemplated.

[0744] LNPs have been shown to be highly effective in delivering siRNAs to the liver (see, e.g., Tabernero et al., Cancer Discovery, April 2013, Vol. 3, No. 4, pages 363-470) and are therefore contemplated for delivering RNA encoding nucleic acid-targeting effector protein to the liver. A dosage of about four doses of 6 mg/kg of the LNP every two weeks may be contemplated. Tabernero et al. demonstrated that tumor regression was observed after the first 2 cycles of LNPs dosed at 0.7 mg/kg, and by the end of 6 cycles the patient had achieved a partial response with complete regression of the lymph node metastasis and substantial shrinkage of the liver tumors. A complete response was obtained after 40 doses in this patient, who has remained in remission and completed treatment after receiving doses over 26 months. Two patients with RCC and extrahepatic sites of disease including kidney, lung, and lymph nodes that were progressing following prior therapy with VEGF pathway inhibitors had stable disease at all sites for approximately 8 to 12 months, and a patient with PNET and liver metastases continued on the extension study for 18 months (36 doses) with stable disease.

[0745] However, the charge of the LNP must be taken into consideration. As cationic lipids combined with negatively charged lipids to induce nonbilayer structures that facilitate intracellular delivery. Because charged LNPs are rapidly cleared from circulation following intravenous injection, ionizable cationic lipids with pKa values below 7 were developed (see, e.g., Rosin et al, Molecular Therapy, vol. 19, no. 12, pages 1286-2200, December 2011). Negatively charged polymers such as RNA may be loaded into LNPs at low pH values (e.g., pH 4) where the ionizable lipids display a positive charge. However, at physiological pH values, the LNPs exhibit a low surface charge compatible with longer circulation times. Four species of ionizable cationic lipids have been focused upon, namely 1,2-dilineoyl-3-dimethylammonium-propane (DLinDAP), 1,2-dilinoleyloxy-3-N,N-dimethylaminopropane (DLinDMA), 1,2-dilinoleyloxy-keto-N,N-dimethyl-3-aminopropane (DLinKDMA), and 1,2-dilinoleyl-4-(2-dimethylaminoethyl)-[1,3]-dioxolane (DLinKC2-DMA). It has been shown that LNP siRNA systems containing these lipids exhibit remarkably different gene silencing properties in hepatocytes in vivo, with potencies varying according to the series DLinKC2-DMA>DLinKDMA>DLinDMA>>DLinDAP employing a Factor VII gene silencing model (see, e.g., Rosin et al, Molecular Therapy, vol. 19, no. 12, pages 1286-2200, December 2011). A dosage of 1 μg/ml of LNP or CRISPR-Cas RNA in or associated with the LNP may be contemplated, especially for a formulation containing DLinKC2-DMA.

[0746] Preparation of LNPs and CRISPR-Cas encapsulation may be used/and or adapted from Rosin et al, Molecular Therapy, vol. 19, no. 12, pages 1286-2200, December 2011). The cationic lipids 1,2-dilineoyl-3-dimethylammonium-propane (DLinDAP), 1,2-dilinoleyloxy-3-N,N-dimethylaminopropane (DLinDMA), 1,2-dilinoleyloxyketo-N,N-dimethyl-3-aminopropane (DLinK-DMA), 1,2-dilinoleyl-4-(2-dimethylaminoethyl)[1,3]-dioxolane (DLinKC2-DMA), (3-o-[2″-(methoxypolyethyleneglycol 2000) succinoyl]-1,2-dimyristoyl-sn-glycol (PEG-S-DMG), and R-3-[(ω-methoxy-poly(ethylene glycol)2000) carbamoyl]-1,2-dimyristyloxlpropyl-3-amine (PEG-C-DOMG) may be provided by Tekmira Pharmaceuticals (Vancouver, Canada) or synthesized. Cholesterol may be purchased from Sigma (St Louis, Mo.). The specific nucleic acid-targeting complex (CRISPR-Cas) RNA may be encapsulated in LNPs containing DLinDAP, DLinDMA, DLinK-DMA, and DLinKC2-DMA (cationic lipid:DSPC:CHOL: PEGS-DMG or PEG-C-DOMG at 40:10:40:10 molar ratios). When required, 0.2% SP-DiOC18 (Invitrogen, Burlington, Canada) may be incorporated to assess cellular uptake, intracellular delivery, and biodistribution. Encapsulation may be performed by dissolving lipid mixtures comprised of cationic lipid:DSPC:cholesterol:PEG-c-DOMG (40:10:40:10 molar ratio) in ethanol to a final lipid concentration of 10 mmol/l. This ethanol solution of lipid may be added drop-wise to 50 mmol/l citrate, pH 4.0 to form multilamellar vesicles to produce a final concentration of 30% ethanol vol/vol. Large unilamellar vesicles may be formed following extrusion of multilamellar vesicles through two stacked 80 nm Nuclepore polycarbonate filters using the Extruder (Northern Lipids, Vancouver, Canada). Encapsulation may be achieved by adding RNA dissolved at 2 mg/ml in 50 mmol/l citrate, pH 4.0 containing 30% ethanol vol/vol drop-wise to extruded preformed large unilamellar vesicles and incubation at 31° C. for 30 minutes with constant mixing to a final RNA/lipid weight ratio of 0.06/1 wt/wt. Removal of ethanol and neutralization of formulation buffer were performed by dialysis against phosphate-buffered saline (PBS), pH 7.4 for 16 hours using Spectra/Por 2 regenerated cellulose dialysis membranes. Particle size distribution may be determined by dynamic light scattering using a NICOMP 370 particle sizer, the vesicle/intensity modes, and Gaussian fitting (Nicomp Particle Sizing, Santa Barbara, Calif.). The particle size for all three LNP systems may be −70 nm in diameter. RNA encapsulation efficiency may be determined by removal of free RNA using VivaPureD MiniH columns (Sartorius Stedim Biotech) from samples collected before and after dialysis. The encapsulated RNA may be extracted from the eluted particles and quantified at 260 nm. RNA to lipid ratio was determined by measurement of cholesterol content in vesicles using the Cholesterol E enzymatic assay from Wako Chemicals USA (Richmond, Va.). In conjunction with the herein discussion of LNPs and PEG lipids, PEGylated liposomes or LNPs are likewise suitable for delivery of a nucleic acid-targeting system or components thereof.

[0747] Preparation of large LNPs may be used/and or adapted from Rosin et al, Molecular Therapy, vol. 19, no. 12, pages 1286-2200, December 2011. A lipid premix solution (20.4 mg/ml total lipid concentration) may be prepared in ethanol containing DLinKC2-DMA, DSPC, and cholesterol at 50:10:38.5 molar ratios. Sodium acetate may be added to the lipid premix at a molar ratio of 0.75:1 (sodium acetate:DLinKC2-DMA). The lipids may be subsequently hydrated by combining the mixture with 1.85 volumes of citrate buffer (10 mmol/l, pH 3.0) with vigorous stirring, resulting in spontaneous liposome formation in aqueous buffer containing 35% ethanol. The liposome solution may be incubated at 37° C. to allow for time-dependent increase in particle size. Aliquots may be removed at various times during incubation to investigate changes in liposome size by dynamic light scattering (Zetasizer Nano ZS, Malvern Instruments, Worcestershire, UK). Once the desired particle size is achieved, an aqueous PEG lipid solution (stock=10 mg/ml PEG-DMG in 35% (vol/vol) ethanol) may be added to the liposome mixture to yield a final PEG molar concentration of 3.5% of total lipid. Upon addition of PEG-lipids, the liposomes should their size, effectively quenching further growth. RNA may then be added to the empty liposomes at a RNA to total lipid ratio of approximately 1:10 (wt:wt), followed by incubation for 30 minutes at 37° C. to form loaded LNPs. The mixture may be subsequently dialyzed overnight in PBS and filtered with a 0.45-μm syringe filter.

[0748] Spherical Nucleic Acid (SNA™) constructs and other particles (particularly gold particles) are also contemplated as a means to delivery nucleic acid-targeting system to intended targets. Significant data show that AuraSense Therapeutics' Spherical Nucleic Acid (SNA™) constructs, based upon nucleic acid-functionalized gold particles, are useful.

[0749] Literature that may be employed in conjunction with herein teachings include: Cutler et al., J. Am. Chem. Soc. 2011 133:9254-9257, Hao et al., Small. 2011 7:3158-3162, Zhang et al., ACS Nano. 2011 5:6962-6970, Cutler et al., J. Am. Chem. Soc. 2012 134:1376-1391, Young et al., Nano Lett. 2012 12:3867-71, Zheng et al., Proc. Natl. Acad. Sci. USA. 2012 109:11975-80, Mirkin, Nanomedicine 2012 7:635-638 Zhang et al., J. Am. Chem. Soc. 2012 134:16488-1691, Weintraub, Nature 2013 495:S14-S16, Choi et al., Proc. Natl. Acad. Sci. USA. 2013 110(19):7625-7630, Jensen et al., Sci. Transl. Med. 5, 209ra152 (2013) and Mirkin, et al., Small, 10:186-192.

[0750] Self-assembling particles with RNA may be constructed with polyethyleneimine (PEI) that is PEGylated with an Arg-Gly-Asp (RGD) peptide ligand attached at the distal end of the polyethylene glycol (PEG). This system has been used, for example, as a means to target tumor neovasculature expressing integrins and deliver siRNA inhibiting vascular endothelial growth factor receptor-2 (VEGF R2) expression and thereby achieve tumor angiogenesis (see, e.g., Schiffelers et al., Nucleic Acids Research, 2004, Vol. 32, No. 19). Nanoplexes may be prepared by mixing equal volumes of aqueous solutions of cationic polymer and nucleic acid to give a net molar excess of ionizable nitrogen (polymer) to phosphate (nucleic acid) over the range of 2 to 6. The electrostatic interactions between cationic polymers and nucleic acid resulted in the formation of polyplexes with average particle size distribution of about 100 nm, hence referred to here as nanoplexes. A dosage of about 100 to 200 mg of nucleic acid-targeting complex RNA is envisioned for delivery in the self-assembling particles of Schiffelers et al.

[0751] The nanoplexes of Bartlett et al. (PNAS, Sep. 25, 2007, vol. 104, no. 39) may also be applied to the present invention. The nanoplexes of Bartlett et al. are prepared by mixing equal volumes of aqueous solutions of cationic polymer and nucleic acid to give a net molar excess of ionizable nitrogen (polymer) to phosphate (nucleic acid) over the range of 2 to 6. The electrostatic interactions between cationic polymers and nucleic acid resulted in the formation of polyplexes with average particle size distribution of about 100 nm, hence referred to here as nanoplexes. The DOTA-siRNA of Bartlett et al. was synthesized as follows: 1,4,7,10-tetraazacyclododecane-1,4,7,10-tetraacetic acid mono(N-hydroxysuccinimide ester) (DOTA-NHSester) was ordered from Macrocyclics (Dallas, Tex.). The amine modified RNA sense strand with a 100-fold molar excess of DOTA-NHS-ester in carbonate buffer (pH 9) was added to a microcentrifuge tube. The contents were reacted by stirring for 4 h at room temperature. The DOTA-RNAsense conjugate was ethanol-precipitated, resuspended in water, and annealed to the unmodified antisense strand to yield DOTA-siRNA. All liquids were pretreated with Chelex-100 (Bio-Rad, Hercules, Calif.) to remove trace metal contaminants. Tf-targeted and nontargeted siRNA particles may be formed by using cyclodextrin-containing polycations. Typically, particles were formed in water at a charge ratio of 3 (+/−) and an siRNA concentration of 0.5 g/liter. One percent of the adamantane-PEG molecules on the surface of the targeted particles were modified with Tf (adamantane-PEG-Tf). The particles were suspended in a 5% (wt/vol) glucose carrier solution for injection.

[0752] Davis et al. (Nature, Vol 464, 15 Apr. 2010) conducts a RNA clinical trial that uses a targeted particle-delivery system (clinical trial registration number NCT00689065). Patients with solid cancers refractory to standard-of-care therapies are administered doses of targeted particles on days 1, 3, 8 and 10 of a 21-day cycle by a 30-min intravenous infusion. The particles comprise, consist essentially of, or consist of a synthetic delivery system containing: (1) a linear, cyclodextrin-based polymer (CDP), (2) a human transferrin protein (TF) targeting ligand displayed on the exterior of the nanoparticle to engage TF receptors (TFR) on the surface of the cancer cells, (3) a hydrophilic polymer (polyethylene glycol (PEG) used to promote nanoparticle stability in biological fluids), and (4) siRNA designed to reduce the expression of the RRM2 (sequence used in the clinic was previously denoted siR2B+5). The TFR has long been known to be upregulated in malignant cells, and RRM2 is an established anti-cancer target. These particles (clinical version denoted as CALAA-01) have been shown to be well tolerated in multi-dosing studies in non-human primates. Although a single patient with chronic myeloid leukaemia has been administered siRNA by liposomal delivery, Davis et al.'s clinical trial is the initial human trial to systemically deliver siRNA with a targeted delivery system and to treat patients with solid cancer. To ascertain whether the targeted delivery system can provide effective delivery of functional siRNA to human tumours, Davis et al. investigated biopsies from three patients from three different dosing cohorts; patients A, B and C, all of whom had metastatic melanoma and received CALAA-01 doses of 18, 24 and 30 mg m⁻² siRNA, respectively. Similar doses may also be contemplated for the nucleic acid-targeting system of the present invention. The delivery of the invention may be achieved with particles containing a linear, cyclodextrin-based polymer (CDP), a human transferrin protein (TF) targeting ligand displayed on the exterior of the particle to engage TF receptors (TFR) on the surface of the cancer cells and/or a hydrophilic polymer (for example, polyethylene glycol (PEG) used to promote particle stability in biological fluids).

[0753] In terms of this invention, it is preferred to have one or more components of nucleic acid-targeting complex, e.g., nucleic acid-targeting effector protein or mRNA, or guide RNA delivered using particles or lipid envelopes. Other delivery systems or vectors are may be used in conjunction with the particle aspects of the invention.

[0754] In general, a “nanoparticle” refers to any particle having a diameter of less than 1000 nm. In certain preferred embodiments, nanoparticles of the invention have a greatest dimension (e.g., diameter) of 500 nm or less. In other preferred embodiments, nanoparticles of the invention have a greatest dimension ranging between 25 nm and 200 nm. In other preferred embodiments, particles of the invention have a greatest dimension of 100 nm or less. In other preferred embodiments, nanoparticles of the invention have a greatest dimension ranging between 35 nm and 60 nm.

[0755] Particles encompassed in the present invention may be provided in different forms, e.g., as solid particles (e.g., metal such as silver, gold, iron, titanium), non-metal, lipid-based solids, polymers), suspensions of particles, or combinations thereof. Metal, dielectric, and semiconductor particles may be prepared, as well as hybrid structures (e.g., core-shell particles). Particles made of semiconducting material may also be labeled quantum dots if they are small enough (typically sub 10 nm) that quantization of electronic energy levels occurs. Such nanoscale particles are used in biomedical applications as drug carriers or imaging agents and may be adapted for similar purposes in the present invention.

[0756] Semi-solid and soft particles have been manufactured, and are within the scope of the present invention. A prototype particle of semi-solid nature is the liposome. Various types of liposome particles are currently used clinically as delivery systems for anticancer drugs and vaccines. Particles with one half hydrophilic and the other half hydrophobic are termed Janus particles and are particularly effective for stabilizing emulsions. They can self-assemble at water/oil interfaces and act as solid surfactants.

[0757] U.S. Pat. No. 8,709,843, incorporated herein by reference, provides a drug delivery system for targeted delivery of therapeutic agent-containing particles to tissues, cells, and intracellular compartments. The invention provides targeted particles comprising polymer conjugated to a surfactant, hydrophilic polymer or lipid.

[0758] U.S. Pat. No. 6,007,845, incorporated herein by reference, provides particles which have a core of a multiblock copolymer formed by covalently linking a multifunctional compound with one or more hydrophobic polymers and one or more hydrophilic polymers, and contain a biologically active material.

[0759] U.S. Pat. No. 5,855,913, incorporated herein by reference, provides a particulate composition having aerodynamically light particles having a tap density of less than 0.4 g/cm3 with a mean diameter of between 5 μm and 30 μm, incorporating a surfactant on the surface thereof for drug delivery to the pulmonary system.

[0760] U.S. Pat. No. 5,985,309, incorporated herein by reference, provides particles incorporating a surfactant and/or a hydrophilic or hydrophobic complex of a positively or negatively charged therapeutic or diagnostic agent and a charged molecule of opposite charge for delivery to the pulmonary system.

[0761] U.S. Pat. No. 5,543,158, incorporated herein by reference, provides biodegradable injectable particles having a biodegradable solid core containing a biologically active material and poly(alkylene glycol) moieties on the surface.

[0762] WO2012135025 (also published as US20120251560), incorporated herein by reference, describes conjugated polyethyleneimine (PEI) polymers and conjugated aza-macrocycles (collectively referred to as “conjugated lipomer” or “lipomers”). In certain embodiments, it can be envisioned that such methods and materials of herein-cited documents, e.g., conjugated lipomers can be used in the context of the nucleic acid-targeting system to achieve in vitro, ex vivo and in vivo genomic perturbations to modify gene expression, including modulation of protein expression.

[0763] In one embodiment, the particle may be epoxide-modified lipid-polymer, advantageously 7C1 (see, e.g., James E. Dahlman and Carmen Barnes et al. Nature Nanotechnology (2014) published online 11 May 2014, doi:10.1038/nnano.2014.84). C71 was synthesized by reacting C15 epoxide-terminated lipids with PEI600 at a 14:1 molar ratio, and was formulated with C14PEG2000 to produce particles (diameter between 35 and 60 nm) that were stable in PBS solution for at least 40 days.

[0764] An epoxide-modified lipid-polymer may be utilized to deliver the nucleic acid-targeting system of the present invention to pulmonary, cardiovascular or renal cells, however, one of skill in the art may adapt the system to deliver to other target organs. Dosage ranging from about 0.05 to about 0.6 mg/kg are envisioned. Dosages over several days or weeks are also envisioned, with a total dosage of about 2 mg/kg.

### Exosomes

[0765] Exosomes are endogenous nano-vesicles that transport RNAs and proteins, and which can deliver RNA to the brain and other target organs. To reduce immunogenicity, Alvarez-Erviti et al. (2011, Nat Biotechnol 29: 341) used self-derived dendritic cells for exosome production. Targeting to the brain was achieved by engineering the dendritic cells to express Lamp2b, an exosomal membrane protein, fused to the neuron-specific RVG peptide. Purified exosomes were loaded with exogenous RNA by electroporation. Intravenously injected RVG-targeted exosomes delivered GAPDH siRNA specifically to neurons, microglia, oligodendrocytes in the brain, resulting in a specific gene knockdown. Pre-exposure to RVG exosomes did not attenuate knockdown, and non-specific uptake in other tissues was not observed. The therapeutic potential of exosome-mediated siRNA delivery was demonstrated by the strong mRNA (60%) and protein (62%) knockdown of BACE1, a therapeutic target in Alzheimer's disease.

[0766] To obtain a pool of immunologically inert exosomes, Alvarez-Erviti et al. harvested bone marrow from inbred C57BL/6 mice with a homogenous major histocompatibility complex (MEW) haplotype. As immature dendritic cells produce large quantities of exosomes devoid of T-cell activators such as MHC-II and CD86, Alvarez-Erviti et al. selected for dendritic cells with granulocyte/macrophage-colony stimulating factor (GM-CSF) for 7 d. Exosomes were purified from the culture supernatant the following day using well-established ultracentrifugation protocols. The exosomes produced were physically homogenous, with a size distribution peaking at 80 nm in diameter as determined by particle tracking analysis (NTA) and electron microscopy. Alvarez-Erviti et al. obtained 6-12 μg of exosomes (measured based on protein concentration) per 10⁶ cells.

[0767] Next, Alvarez-Erviti et al. investigated the possibility of loading modified exosomes with exogenous cargoes using electroporation protocols adapted for nanoscale applications. As electroporation for membrane particles at the nanometer scale is not well-characterized, nonspecific Cy5-labeled RNA was used for the empirical optimization of the electroporation protocol. The amount of encapsulated RNA was assayed after ultracentrifugation and lysis of exosomes. Electroporation at 400 V and 125 μF resulted in the greatest retention of RNA and was used for all subsequent experiments.

[0768] Alvarez-Erviti et al. administered 150 μg of each BACE1 siRNA encapsulated in 150 μg of RVG exosomes to normal C57BL/6 mice and compared the knockdown efficiency to four controls: untreated mice, mice injected with RVG exosomes only, mice injected with BACE1 siRNA complexed to an in vivo cationic liposome reagent and mice injected with BACE1 siRNA complexed to RVG-9R, the RVG peptide conjugated to 9 D-arginines that electrostatically binds to the siRNA. Cortical tissue samples were analyzed 3 d after administration and a significant protein knockdown (45%, P<0.05, versus 62%, P<0.01) in both siRNA-RVG-9R-treated and siRNARVG exosome-treated mice was observed, resulting from a significant decrease in BACE1 mRNA levels (66% [+ or −] 15%, P<0.001 and 61% [+ or −] 13% respectively, P<0.01). Moreover, Applicants demonstrated a significant decrease (55%, P<0.05) in the total [beta]-amyloid 1-42 levels, a main component of the amyloid plaques in Alzheimer's pathology, in the RVG-exosome-treated animals. The decrease observed was greater than the β-amyloid 1-40 decrease demonstrated in normal mice after intraventricular injection of BACE1 inhibitors. Alvarez-Erviti et al. carried out 5′-rapid amplification of cDNA ends (RACE) on BACE1 cleavage product, which provided evidence of RNAi-mediated knockdown by the siRNA.

[0769] Finally, Alvarez-Erviti et al. investigated whether RNA-RVG exosomes induced immune responses in vivo by assessing IL-6, IP-10, TNFα and IFN-α serum concentrations. Following exosome treatment, nonsignificant changes in all cytokines were registered similar to siRNA-transfection reagent treatment in contrast to siRNA-RVG-9R, which potently stimulated IL-6 secretion, confirming the immunologically inert profile of the exosome treatment. Given that exosomes encapsulate only 20% of siRNA, delivery with RVG-exosome appears to be more efficient than RVG-9R delivery as comparable mRNA knockdown and greater protein knockdown was achieved with fivefold less siRNA without the corresponding level of immune stimulation. This experiment demonstrated the therapeutic potential of RVG-exosome technology, which is potentially suited for long-term silencing of genes related to neurodegenerative diseases. The exosome delivery system of Alvarez-Erviti et al. may be applied to deliver the nucleic acid-targeting system of the present invention to therapeutic targets, especially neurodegenerative diseases. A dosage of about 100 to 1000 mg of nucleic acid-targeting system encapsulated in about 100 to 1000 mg of RVG exosomes may be contemplated for the present invention.

[0770] El-Andaloussi et al. (Nature Protocols 7,2112-2126 (2012)) discloses how exosomes derived from cultured cells can be harnessed for delivery of RNA in vitro and in vivo. This protocol first describes the generation of targeted exosomes through transfection of an expression vector, comprising an exosomal protein fused with a peptide ligand. Next, El-Andaloussi et al. explain how to purify and characterize exosomes from transfected cell supernatant. Next, El-Andaloussi et al. detail crucial steps for loading RNA into exosomes. Finally, El-Andaloussi et al. outline how to use exosomes to efficiently deliver RNA in vitro and in vivo in mouse brain. Examples of anticipated results in which exosome-mediated RNA delivery is evaluated by functional assays and imaging are also provided. The entire protocol takes ˜3 weeks. Delivery or administration according to the invention may be performed using exosomes produced from self-derived dendritic cells. From the herein teachings, this can be employed in the practice of the invention

[0771] In another embodiment, the plasma exosomes of Wahlgren et al. (Nucleic Acids Research, 2012, Vol. 40, No. 17 e130) are contemplated. Exosomes are nano-sized vesicles (30-90 nm in size) produced by many cell types, including dendritic cells (DC), B cells, T cells, mast cells, epithelial cells and tumor cells. These vesicles are formed by inward budding of late endosomes and are then released to the extracellular environment upon fusion with the plasma membrane. Because exosomes naturally carry RNA between cells, this property may be useful in gene therapy, and from this disclosure can be employed in the practice of the instant invention.

[0772] Exosomes from plasma can be prepared by centrifugation of buffy coat at 900 g for 20 min to isolate the plasma followed by harvesting cell supernatants, centrifuging at 300 g for 10 min to eliminate cells and at 16 500 g for 30 min followed by filtration through a 0.22 mm filter. Exosomes are pelleted by ultracentrifugation at 120 000 g for 70 min. Chemical transfection of siRNA into exosomes is carried out according to the manufacturer's instructions in RNAi Human/Mouse Starter Kit (Quiagen, Hilden, Germany). siRNA is added to 100 ml PBS at a final concentration of 2 mmol/ml. After adding HiPerFect transfection reagent, the mixture is incubated for 10 min at RT. In order to remove the excess of micelles, the exosomes are re-isolated using aldehyde/sulfate latex beads. The chemical transfection of nucleic acid-targeting system into exosomes may be conducted similarly to siRNA. The exosomes may be co-cultured with monocytes and lymphocytes isolated from the peripheral blood of healthy donors. Therefore, it may be contemplated that exosomes containing nucleic acid-targeting system may be introduced to monocytes and lymphocytes of and autologously reintroduced into a human. Accordingly, delivery or administration according to the invention may be performed using plasma exosomes.

### Liposomes

[0773] Delivery or administration according to the invention can be performed with liposomes. Liposomes are spherical vesicle structures composed of a uni- or multilamellar lipid bilayer surrounding internal aqueous compartments and a relatively impermeable outer lipophilic phospholipid bilayer. Liposomes have gained considerable attention as drug delivery carriers because they are biocompatible, nontoxic, can deliver both hydrophilic and lipophilic drug molecules, protect their cargo from degradation by plasma enzymes, and transport their load across biological membranes and the blood brain barrier (BBB) (see, e.g., Spuch and Navarro, Journal of Drug Delivery, vol. 2011, Article ID 469679, 12 pages, 2011. doi:10.1155/2011/469679 for review).

[0774] Liposomes can be made from several different types of lipids; however, phospholipids are most commonly used to generate liposomes as drug carriers. Although liposome formation is spontaneous when a lipid film is mixed with an aqueous solution, it can also be expedited by applying force in the form of shaking by using a homogenizer, sonicator, or an extrusion apparatus (see, e.g., Spuch and Navarro, Journal of Drug Delivery, vol. 2011, Article ID 469679, 12 pages, 2011. doi:10.1155/2011/469679 for review).

[0775] Several other additives may be added to liposomes in order to modify their structure and properties. For instance, either cholesterol or sphingomyelin may be added to the liposomal mixture in order to help stabilize the liposomal structure and to prevent the leakage of the liposomal inner cargo. Further, liposomes are prepared from hydrogenated egg phosphatidylcholine or egg phosphatidylcholine, cholesterol, and dicetyl phosphate, and their mean vesicle sizes were adjusted to about 50 and 100 nm. (see, e.g., Spuch and Navarro, Journal of Drug Delivery, vol. 2011, Article ID 469679, 12 pages, 2011. doi:10.1155/2011/469679 for review).

[0776] A liposome formulation may be mainly comprised of natural phospholipids and lipids such as 1,2-distearoryl-sn-glycero-3-phosphatidyl choline (DSPC), sphingomyelin, egg phosphatidylcholines and monosialoganglioside. Since this formulation is made up of phospholipids only, liposomal formulations have encountered many challenges, one of the ones being the instability in plasma. Several attempts to overcome these challenges have been made, specifically in the manipulation of the lipid membrane. One of these attempts focused on the manipulation of cholesterol. Addition of cholesterol to conventional formulations reduces rapid release of the encapsulated bioactive compound into the plasma or 1,2-dioleoyl-sn-glycero-3-phosphoethanolamine (DOPE) increases the stability (see, e.g., Spuch and Navarro, Journal of Drug Delivery, vol. 2011, Article ID 469679, 12 pages, 2011. doi:10.1155/2011/469679 for review).

[0777] In a particularly advantageous embodiment, Trojan Horse liposomes (also known as Molecular Trojan Horses) are desirable and protocols may be found at eshprotocols.cshlp.org/content/2010/4/pdb.prot5407.long. These particles allow delivery of a transgene to the entire brain after an intravascular injection. Without being bound by limitation, it is believed that neutral lipid particles with specific antibodies conjugated to surface allow crossing of the blood brain barrier via endocytosis. Applicant postulates utilizing Trojan Horse Liposomes to deliver the CRISPR family of nucleases to the brain via an intravascular injection, which would allow whole brain transgenic animals without the need for embryonic manipulation. About 1-5 g of DNA or RNA may be contemplated for in vivo administration in liposomes.

[0778] In another embodiment, the nucleic acid-targeting system or conmponents thereof may be administered in liposomes, such as a stable nucleic-acid-lipid particle (SNALP) (see, e.g., Morrissey et al., Nature Biotechnology, Vol. 23, No. 8, August 2005). Daily intravenous injections of about 1, 3 or 5 mg/kg/day of a specific nucleic acid-targeting system targeted in a SNALP are contemplated. The daily treatment may be over about three days and then weekly for about five weeks. In another embodiment, a specific nucleic acid-targeting system encapsulated SNALP) administered by intravenous injection to at doses of about 1 or 2.5 mg/kg are also contemplated (see, e.g., Zimmerman et al., Nature Letters, Vol. 441, 4 May 2006). The SNALP formulation may contain the lipids 3-N-[(wmethoxypoly(ethylene glycol) 2000) carbamoyl]-1,2-dimyristyloxy-propylamine (PEG-C-DMA), 1,2-dilinoleyloxy-N,N-dimethyl-3-aminopropane (DLinDMA), 1,2-distearoyl-sn-glycero-3-phosphocholine (DSPC) and cholesterol, in a 2:40:10:48 molar percent ratio (see, e.g., Zimmerman et al., Nature Letters, Vol. 441, 4 May 2006).

[0779] In another embodiment, stable nucleic-acid-lipid particles (SNALPs) have proven to be effective delivery molecules to highly vascularized HepG2-derived liver tumors but not in poorly vascularized HCT-116 derived liver tumors (see, e.g., Li, Gene Therapy (2012) 19, 775-780). The SNALP liposomes may be prepared by formulating D-Lin-DMA and PEG-C-DMA with distearoylphosphatidylcholine (DSPC), Cholesterol and siRNA using a 25:1 lipid/siRNA ratio and a 48/40/10/2 molar ratio of Cholesterol/D-Lin-DMA/DSPC/PEG-C-DMA. The resulted SNALP liposomes are about 80-100 nm in size.

[0780] In yet another embodiment, a SNALP may comprise synthetic cholesterol (Sigma-Aldrich, St Louis, Mo., USA), dipalmitoylphosphatidylcholine (Avanti Polar Lipids, Alabaster, Ala., USA), 3-N-[(w-methoxy poly(ethylene glycol)2000)carbamoyl]-1,2-dimyrestyloxypropylamine, and cationic 1,2-dilinoleyloxy-3-N,Ndimethylaminopropane (see, e.g., Geisbert et al., Lancet 2010; 375: 1896-905). A dosage of about 2 mg/kg total nucleic acid-targeting systemper dose administered as, for example, a bolus intravenous infusion may be contemplated.

[0781] In yet another embodiment, a SNALP may comprise synthetic cholesterol (Sigma-Aldrich), 1,2-distearoyl-sn-glycero-3-phosphocholine (DSPC; Avanti Polar Lipids Inc.), PEG-cDMA, and 1,2-dilinoleyloxy-3-(N;N-dimethyl)aminopropane (DLinDMA) (see, e.g., Judge, J. Clin. Invest. 119:661-673 (2009)). Formulations used for in vivo studies may comprise a final lipid/RNA mass ratio of about 9:1.

[0782] The safety profile of RNAi nanomedicines has been reviewed by Barros and Gollob of Alnylam Pharmaceuticals (see, e.g., Advanced Drug Delivery Reviews 64 (2012) 1730-1737). The stable nucleic acid lipid particle (SNALP) is comprised of four different lipids—an ionizable lipid (DLinDMA) that is cationic at low pH, a neutral helper lipid, cholesterol, and a diffusible polyethylene glycol (PEG)-lipid. The particle is approximately 80 nm in diameter and is charge-neutral at physiologic pH. During formulation, the ionizable lipid serves to condense lipid with the anionic RNA during particle formation. When positively charged under increasingly acidic endosomal conditions, the ionizable lipid also mediates the fusion of SNALP with the endosomal membrane enabling release of RNA into the cytoplasm. The PEG-lipid stabilizes the particle and reduces aggregation during formulation, and subsequently provides a neutral hydrophilic exterior that improves pharmacokinetic properties.

[0783] To date, two clinical programs have been initiated using SNALP formulations with RNA. Tekmira Pharmaceuticals recently completed a phase I single-dose study of SNALP-ApoB in adult volunteers with elevated LDL cholesterol. ApoB is predominantly expressed in the liver and jejunum and is essential for the assembly and secretion of VLDL and LDL. Seventeen subjects received a single dose of SNALP-ApoB (dose escalation across 7 dose levels). There was no evidence of liver toxicity (anticipated as the potential dose-limiting toxicity based on preclinical studies). One (of two) subjects at the highest dose experienced flu-like symptoms consistent with immune system stimulation, and the decision was made to conclude the trial.

[0784] Alnylam Pharmaceuticals has similarly advanced ALN-TTR01, which employs the SNALP technology described above and targets hepatocyte production of both mutant and wild-type TTR to treat TTR amyloidosis (ATTR). Three ATTR syndromes have been described: familial amyloidotic polyneuropathy (FAP) and familial amyloidotic cardiomyopathy (FAC) both caused by autosomal dominant mutations in TTR; and senile systemic amyloidosis (SSA) cause by wildtype TTR. A placebo-controlled, single dose-escalation phase I trial of ALN-TTR01 was recently completed in patients with ATTR. ALN-TTR01 was administered as a 15-minute IV infusion to 31 patients (23 with study drug and 8 with placebo) within a dose range of 0.01 to 1.0 mg/kg (based on siRNA). Treatment was well tolerated with no significant increases in liver function tests. Infusion-related reactions were noted in 3 of 23 patients at ≥0.4 mg/kg; all responded to slowing of the infusion rate and all continued on study. Minimal and transient elevations of serum cytokines IL-6, IP-10 and IL-1ra were noted in two patients at the highest dose of 1 mg/kg (as anticipated from preclinical and NHP studies). Lowering of serum TTR, the expected pharmacodynamics effect of ALN-TTR01, was observed at 1 mg/kg.

[0785] In yet another embodiment, a SNALP may be made by solubilizing a cationic lipid, DSPC, cholesterol and PEG-lipid e.g., in ethanol, e.g., at a molar ratio of 40:10:40:10, respectively (see, Semple et al., Nature Niotechnology, Volume 28 Number 2 Feb. 2010, pp. 172-177). The lipid mixture was added to an aqueous buffer (50 mM citrate, pH 4) with mixing to a final ethanol and lipid concentration of 30% (vol/vol) and 6.1 mg/ml, respectively, and allowed to equilibrate at 22° C. for 2 min before extrusion. The hydrated lipids were extruded through two stacked 80 nm pore-sized filters (Nuclepore) at 22° C. using a Lipex Extruder (Northern Lipids) until a vesicle diameter of 70-90 nm, as determined by dynamic light scattering analysis, was obtained. This generally required 1-3 passes. The siRNA (solubilized in a 50 mM citrate, pH 4 aqueous solution containing 30% ethanol) was added to the pre-equilibrated (35° C.) vesicles at a rate of −5 ml/min with mixing. After a final target siRNA/lipid ratio of 0.06 (wt/wt) was reached, the mixture was incubated for a further 30 min at 35° C. to allow vesicle reorganization and encapsulation of the siRNA. The ethanol was then removed and the external buffer replaced with PBS (155 mM NaCl, 3 mM Na₂HPO₄, 1 mM KH₂PO₄, pH 7.5) by either dialysis or tangential flow diafiltration. siRNA were encapsulated in SNALP using a controlled step-wise dilution method process. The lipid constituents of KC2-SNALP were DLin-KC2-DMA (cationic lipid), dipalmitoylphosphatidylcholine (DPPC; Avanti Polar Lipids), synthetic cholesterol (Sigma) and PEG-C-DMA used at a molar ratio of 57.1:7.1:34.3:1.4. Upon formation of the loaded particles, SNALP were dialyzed against PBS and filter sterilized through a 0.2 μm filter before use. Mean particle sizes were 75-85 nm and 90-95% of the siRNA was encapsulated within the lipid particles. The final siRNA/lipid ratio in formulations used for in vivo testing was ˜0.15 (wt/wt). LNP-siRNA systems containing Factor VII siRNA were diluted to the appropriate concentrations in sterile PBS immediately before use and the formulations were administered intravenously through the lateral tail vein in a total volume of 10 ml/kg. This method and these delivery systems may be extrapolated to the nucleic acid-targeting system of the present invention.

[0786] Other Lipids

[0787] Other cationic lipids, such as amino lipid 2,2-dilinoleyl-4-dimethylaminoethyl-[1,3]-dioxolane (DLin-KC2-DMA) may be utilized to encapsulate nucleic acid-targeting system or components thereof or nucleic acid molecule(s) coding therefor e.g., similar to SiRNA (see, e.g., Jayaraman, Angew. Chem. Int. Ed. 2012, 51, 8529-8533), and hence may be employed in the practice of the invention. A preformed vesicle with the following lipid composition may be contemplated: amino lipid, di stearoylphosphatidylcholine (DSPC), cholesterol and (R)-2,3-bis(octadecyloxy) propyl-1-(methoxy poly(ethylene glycol)2000)propylcarbamate (PEG-lipid) in the molar ratio 40/10/40/10, respectively, and a FVII siRNA/total lipid ratio of approximately 0.05 (w/w). To ensure a narrow particle size distribution in the range of 70-90 nm and a low polydispersity index of 0.11±0.04 (n=56), the particles may be extruded up to three times through 80 nm membranes prior to adding the guide RNA. Particles containing the highly potent amino lipid 16 may be used, in which the molar ratio of the four lipid components 16, DSPC, cholesterol and PEG-lipid (50/10/38.5/1.5) which may be further optimized to enhance in vivo activity.

[0788] Michael S D Kormann et al. (“Expression of therapeutic proteins after delivery of chemically modified mRNA in mice: Nature Biotechnology, Volume: 29, Pages: 154-157 (2011)) describes the use of lipid envelopes to deliver RNA. Use of lipid envelopes is also preferred in the present invention.

[0789] In another embodiment, lipids may be formulated with the nucleic acid-targeting system of the present invention or component(s) thereof or nucleic acid molecule(s) coding therefor to form lipid nanoparticles (LNPs). Lipids include, but are not limited to, DLin-KC2-DMA4, C12-200 and colipids disteroylphosphatidyl choline, cholesterol, and PEG-DMG may be formulated with RNA-targeting system instead of siRNA (see, e.g., Novobrantseva, Molecular Therapy—Nucleic Acids (2012) 1, e4; doi:10.1038/mtna.2011.3) using a spontaneous vesicle formation procedure. The component molar ratio may be about 50/10/38.5/1.5 (DLin-KC2-DMA or C12-200/disteroylphosphatidyl choline/cholesterol/PEG-DMG). The final lipid: siRNA weight ratio may be ˜12:1 and 9:1 in the case of DLin-KC2-DMA and C12-200 lipid particles (LNPs), respectively. The formulations may have mean particle diameters of ˜80 nm with >90% entrapment efficiency. A 3 mg/kg dose may be contemplated.

[0790] Tekmira has a portfolio of approximately 95 patent families, in the U.S. and abroad, that are directed to various aspects of LNPs and LNP formulations (see, e.g., U.S. Pat. Nos. 7,982,027; 7,799,565; 8,058,069; 8,283,333; 7,901,708; 7,745,651; 7,803,397; 8,101,741; 8,188,263; 7,915,399; 8,236,943 and 7,838,658 and European Pat. Nos 1766035; 1519714; 1781593 and 1664316), all of which may be used and/or adapted to the present invention.

[0791] The nucleic acid-targeting system or components thereof or nucleic acid molecule(s) coding therefor may be delivered encapsulated in PLGA Microspheres such as that further described in US published applications 20130252281 and 20130245107 and 20130244279 (assigned to Moderna Therapeutics) which relate to aspects of formulation of compositions comprising modified nucleic acid molecules which may encode a protein, a protein precursor, or a partially or fully processed form of the protein or a protein precursor. The formulation may have a molar ratio 50:10:38.5:1.5-3.0 (cationic lipid:fusogenic lipid:cholesterol:PEG lipid). The PEG lipid may be selected from, but is not limited to PEG-c-DOMG, PEG-DMG. The fusogenic lipid may be DSPC. See also, Schrum et al., Delivery and Formulation of Engineered Nucleic Acids, US published application 20120251618.

[0792] Nanomerics' technology addresses bioavailability challenges for a broad range of therapeutics, including low molecular weight hydrophobic drugs, peptides, and nucleic acid based therapeutics (plasmid, siRNA, miRNA). Specific administration routes for which the technology has demonstrated clear advantages include the oral route, transport across the blood-brain-barrier, delivery to solid tumours, as well as to the eye. See, e.g., Mazza et al., 2013, ACS Nano. 2013 Feb. 26; 7(2):1016-26; Uchegbu and Siew, 2013, J Pharm Sci. 102(2):305-10 and Lalatsa et al., 2012, J Control Release. 2012 Jul. 20; 161(2):523-36.

[0793] US Patent Publication No. 20050019923 describes cationic dendrimers for delivering bioactive molecules, such as polynucleotide molecules, peptides and polypeptides and/or pharmaceutical agents, to a mammalian body. The dendrimers are suitable for targeting the delivery of the bioactive molecules to, for example, the liver, spleen, lung, kidney or heart (or even the brain). Dendrimers are synthetic 3-dimensional macromolecules that are prepared in a step-wise fashion from simple branched monomer units, the nature and functionality of which can be easily controlled and varied. Dendrimers are synthesized from the repeated addition of building blocks to a multifunctional core (divergent approach to synthesis), or towards a multifunctional core (convergent approach to synthesis) and each addition of a 3-dimensional shell of building blocks leads to the formation of a higher generation of the dendrimers. Polypropylenimine dendrimers start from a diaminobutane core to which is added twice the number of amino groups by a double Michael addition of acrylonitrile to the primary amines followed by the hydrogenation of the nitriles. This results in a doubling of the amino groups. Polypropylenimine dendrimers contain 100% protonable nitrogens and up to 64 terminal amino groups (generation 5, DAB 64). Protonable groups are usually amine groups which are able to accept protons at neutral pH. The use of dendrimers as gene delivery agents has largely focused on the use of the polyamidoamine, and phosphorous containing compounds with a mixture of amine/amide or N—P(O₂)S as the conjugating units respectively with no work being reported on the use of the lower generation polypropylenimine dendrimers for gene delivery. Polypropylenimine dendrimers have also been studied as pH sensitive controlled release systems for drug delivery and for their encapsulation of guest molecules when chemically modified by peripheral amino acid groups. The cytotoxicity and interaction of polypropylenimine dendrimers with DNA as well as the transfection efficacy of DAB 64 has also been studied.

[0794] US Patent Publication No. 20050019923 is based upon the observation that, contrary to earlier reports, cationic dendrimers, such as polypropylenimine dendrimers, display suitable properties, such as specific targeting and low toxicity, for use in the targeted delivery of bioactive molecules, such as genetic material. In addition, derivatives of the cationic dendrimer also display suitable properties for the targeted delivery of bioactive molecules. See also, Bioactive Polymers, US published application 20080267903, which discloses “Various polymers, including cationic polyamine polymers and dendrimeric polymers, are shown to possess anti-proliferative activity, and may therefore be useful for treatment of disorders characterised by undesirable cellular proliferation such as neoplasms and tumours, inflammatory disorders (including autoimmune disorders), psoriasis and atherosclerosis. The polymers may be used alone as active agents, or as delivery vehicles for other therapeutic agents, such as drug molecules or nucleic acids for gene therapy. In such cases, the polymers' own intrinsic anti-tumour activity may complement the activity of the agent to be delivered.” The disclosures of these patent publications may be employed in conjunction with herein teachings for delivery of nucleic acid-targetingsystem(s) or component(s) thereof or nucleic acid molecule(s) coding therefor.

### Supercharged Proteins

[0795] Supercharged proteins are a class of engineered or naturally occurring proteins with unusually high positive or negative net theoretical charge and may be employed in delivery of nucleic acid-targetingsystem(s) or component(s) thereof or nucleic acid molecule(s) coding therefor. Both supernegatively and superpositively charged proteins exhibit a remarkable ability to withstand thermally or chemically induced aggregation. Superpositively charged proteins are also able to penetrate mammalian cells. Associating cargo with these proteins, such as plasmid DNA, RNA, or other proteins, can enable the functional delivery of these macromolecules into mammalian cells both in vitro and in vivo. David Liu's lab reported the creation and characterization of supercharged proteins in 2007 (Lawrence et al., 2007, Journal of the American Chemical Society 129, 10110-10112).

[0796] The nonviral delivery of RNA and plasmid DNA into mammalian cells are valuable both for research and therapeutic applications (Akinc et al., 2010, Nat. Biotech. 26, 561-569). Purified+36 GFP protein (or other superpositively charged protein) is mixed with RNAs in the appropriate serum-free media and allowed to complex prior addition to cells. Inclusion of serum at this stage inhibits formation of the supercharged protein-RNA complexes and reduces the effectiveness of the treatment. The following protocol has been found to be effective for a variety of cell lines (McNaughton et al., 2009, Proc. Natl. Acad. Sci. USA 106, 6111-6116). However, pilot experiments varying the dose of protein and RNA should be performed to optimize the procedure for specific cell lines.
[0797] (1) One day before treatment, plate 1×10⁵ cells per well in a 48-well plate.
[0798] (2) On the day of treatment, dilute purified+36 GFP protein in serumfree media to a final concentration 200 nM. Add RNA to a final concentration of 50 nM. Vortex to mix and incubate at room temperature for 10 min.
[0799] (3) During incubation, aspirate media from cells and wash once with PBS.
[0800] (4) Following incubation of +36 GFP and RNA, add the protein-RNA complexes to cells.
[0801] (5) Incubate cells with complexes at 37° C. for 4h.
[0802] (6) Following incubation, aspirate the media and wash three times with 20 U/mL heparin PBS. Incubate cells with serum-containing media for a further 48h or longer depending upon the assay for activity.
[0803] (7) Analyze cells by immunoblot, qPCR, phenotypic assay, or other appropriate method.

[0804] David Liu's lab has further found+36 GFP to be an effective plasmid delivery reagent in a range of cells. As plasmid DNA is a larger cargo than siRNA, proportionately more +36 GFP protein is required to effectively complex plasmids. For effective plasmid delivery Applicants have developed a variant of +36 GFP bearing a C-terminal HA2 peptide tag, a known endosome-disrupting peptide derived from the influenza virus hemagglutinin protein. The following protocol has been effective in a variety of cells, but as above it is advised that plasmid DNA and supercharged protein doses be optimized for specific cell lines and delivery applications.
[0805] (1) One day before treatment, plate 1×10⁵ per well in a 48-well plate.
[0806] (2) On the day of treatment, dilute purified [symbol] 36 GFP protein in serumfree media to a final concentration 2 mM. Add 1 mg of plasmid DNA. Vortex to mix and incubate at room temperature for 10 min.
[0807] (3) During incubation, aspirate media from cells and wash once with PBS.
[0808] (4) Following incubation of [symbol] 36 GFP and plasmid DNA, gently add the protein-DNA complexes to cells.
[0809] (5) Incubate cells with complexes at 37 C for 4h.
[0810] (6) Following incubation, aspirate the media and wash with PBS. Incubate cells in serum-containing media and incubate for a further 24-48h.
[0811] (7) Analyze plasmid delivery (e.g., by plasmid-driven gene expression) as appropriate.

[0812] See also, e.g., McNaughton et al., Proc. Natl. Acad. Sci. USA 106, 6111-6116 (2009); Cronican et al., ACS Chemical Biology 5, 747-752 (2010); Cronican et al., Chemistry & Biology 18, 833-838 (2011); Thompson et al., Methods in Enzymology 503, 293-319 (2012); Thompson, D. B., et al., Chemistry & Biology 19 (7), 831-843 (2012). The methods of the super charged proteins may be used and/or adapted for delivery of the nucleic acid-targeting system of the present invention. These systems of Dr. Lui and documents herein in conjunction with herein teachings can be employed in the delivery of nucleic acid-targeting system(s) or component(s) thereof or nucleic acid molecule(s) coding therefor.

### Cell Penetrating Peptides (CPPs)

[0813] In yet another embodiment, cell penetrating peptides (CPPs) are contemplated for the delivery of the CRISPR Cas system. CPPs are short peptides that facilitate cellular uptake of various molecular cargo (from nanosize particles to small chemical molecules and large fragments of DNA). The term “cargo” as used herein includes but is not limited to the group consisting of therapeutic agents, diagnostic probes, peptides, nucleic acids, antisense oligonucleotides, plasmids, proteins, particles including nanoparticles, liposomes, chromophores, small molecules and radioactive materials. In aspects of the invention, the cargo may also comprise any component of the CRISPR Cas system or the entire functional CRISPR Cas system. Aspects of the present invention further provide methods for delivering a desired cargo into a subject comprising: (a) preparing a complex comprising the cell penetrating peptide of the present invention and a desired cargo, and (b) orally, intraarticularly, intraperitoneally, intrathecally, intrarterially, intranasally, intraparenchymally, subcutaneously, intramuscularly, intravenously, dermally, intrarectally, or topically administering the complex to a subject. The cargo is associated with the peptides either through chemical linkage via covalent bonds or through non-covalent interactions.

[0814] The function of the CPPs are to deliver the cargo into cells, a process that commonly occurs through endocytosis with the cargo delivered to the endosomes of living mammalian cells. Cell-penetrating peptides are of different sizes, amino acid sequences, and charges but all CPPs have one distinct characteristic, which is the ability to translocate the plasma membrane and facilitate the delivery of various molecular cargoes to the cytoplasm or an organelle. CPP translocation may be classified into three main entry mechanisms: direct penetration in the membrane, endocytosis-mediated entry, and translocation through the formation of a transitory structure. CPPs have found numerous applications in medicine as drug delivery agents in the treatment of different diseases including cancer and virus inhibitors, as well as contrast agents for cell labeling. Examples of the latter include acting as a carrier for GFP, MRI contrast agents, or quantum dots. CPPs hold great potential as in vitro and in vivo delivery vectors for use in research and medicine. CPPs typically have an amino acid composition that either contains a high relative abundance of positively charged amino acids such as lysine or arginine or has sequences that contain an alternating pattern of polar/charged amino acids and non-polar, hydrophobic amino acids. These two types of structures are referred to as polycationic or amphipathic, respectively. A third class of CPPs are the hydrophobic peptides, containing only apolar residues, with low net charge or have hydrophobic amino acid groups that are crucial for cellular uptake. One of the initial CPPs discovered was the trans-activating transcriptional activator (Tat) from Human Immunodeficiency Virus 1 (HIV-1) which was found to be efficiently taken up from the surrounding media by numerous cell types in culture. Since then, the number of known CPPs has expanded considerably and small molecule synthetic analogues with more effective protein transduction properties have been generated. CPPs include but are not limited to Penetratin, Tat (48-60), Transportan, and (R-AhX-R4) (Ahx=aminohexanoyl).

[0815] U.S. Pat. No. 8,372,951, provides a CPP derived from eosinophil cationic protein (ECP) which exhibits highly cell-penetrating efficiency and low toxicity. Aspects of delivering the CPP with its cargo into a vertebrate subject are also provided. Further aspects of CPPs and their delivery are described in U.S. Pat. Nos. 8,575,305; 8,614,194 and 8,044,019. CPPs can be used to deliver the CRISPR-Cas system or components thereof. That CPPs can be employed to deliver the CRISPR-Cas system or components thereof is also provided in the manuscript “Gene disruption by cell-penetrating peptide-mediated delivery of Cas9 protein and guide RNA”, by Suresh Ramakrishna, Abu-Bonsrah Kwaku Dad, Jagadish Beloor, et al. Genome Res. 2014 Apr. 2. [Epub ahead of print], incorporated by reference in its entirety, wherein it is demonstrated that treatment with CPP-conjugated recombinant Cas9 protein and CPP-complexed guide RNAs lead to endogenous gene disruptions in human cell lines. In the paper the Cas9 protein was conjugated to CPP via a thioether bond, whereas the guide RNA was complexed with CPP, forming condensed, positively charged particles. It was shown that simultaneous and sequential treatment of human cells, including embryonic stem cells, dermal fibroblasts, HEK293T cells, HeLa cells, and embryonic carcinoma cells, with the modified Cas9 and guide RNA led to efficient gene disruptions with reduced off-target mutations relative to plasmid transfections.

### Implantable Devices

[0816] In another embodiment, implantable devices are also contemplated for delivery of the nucleic acid-targeting system or component(s) thereof or nucleic acid molecule(s) coding therefor. For example, US Patent Publication 20110195123 discloses an implantable medical device which elutes a drug locally and in prolonged period is provided, including several types of such a device, the treatment modes of implementation and methods of implantation. The device comprising of polymeric substrate, such as a matrix for example, that is used as the device body, and drugs, and in some cases additional scaffolding materials, such as metals or additional polymers, and materials to enhance visibility and imaging. An implantable delivery device can be advantageous in providing release locally and over a prolonged period, where drug is released directly to the extracellular matrix (ECM) of the diseased area such as tumor, inflammation, degeneration or for symptomatic objectives, or to injured smooth muscle cells, or for prevention. One kind of drug is RNA, as disclosed above, and this system may be used/and or adapted to the nucleic acid-targeting system of the present invention. The modes of implantation in some embodiments are existing implantation procedures that are developed and used today for other treatments, including brachytherapy and needle biopsy. In such cases the dimensions of the new implant described in this invention are similar to the original implant. Typically a few devices are implanted during the same treatment procedure.

[0817] US Patent Publication 20110195123, provideS a drug delivery implantable or insertable system, including systems applicable to a cavity such as the abdominal cavity and/or any other type of administration in which the drug delivery system is not anchored or attached, comprising a biostable and/or degradable and/or bioabsorbable polymeric substrate, which may for example optionally be a matrix. It should be noted that the term “insertion” also includes implantation. The drug delivery system is preferably implemented as a “Loder” as described in US Patent Publication 20110195123.

[0818] The polymer or plurality of polymers are biocompatible, incorporating an agent and/or plurality of agents, enabling the release of agent at a controlled rate, wherein the total volume of the polymeric substrate, such as a matrix for example, in some embodiments is optionally and preferably no greater than a maximum volume that permits a therapeutic level of the agent to be reached. As a non-limiting example, such a volume is preferably within the range of 0.1 m³ to 1000 mm³, as required by the volume for the agent load. The Loder may optionally be larger, for example when incorporated with a device whose size is determined by functionality, for example and without limitation, a knee joint, an intra-uterine or cervical ring and the like.

[0819] The drug delivery system (for delivering the composition) is designed in some embodiments to preferably employ degradable polymers, wherein the main release mechanism is bulk erosion; or in some embodiments, non degradable, or slowly degraded polymers are used, wherein the main release mechanism is diffusion rather than bulk erosion, so that the outer part functions as membrane, and its internal part functions as a drug reservoir, which practically is not affected by the surroundings for an extended period (for example from about a week to about a few months). Combinations of different polymers with different release mechanisms may also optionally be used. The concentration gradient at the surface is preferably maintained effectively constant during a significant period of the total drug releasing period, and therefore the diffusion rate is effectively constant (termed “zero mode” diffusion). By the term “constant” it is meant a diffusion rate that is preferably maintained above the lower threshold of therapeutic effectiveness, but which may still optionally feature an initial burst and/or may fluctuate, for example increasing and decreasing to a certain degree. The diffusion rate is preferably so maintained for a prolonged period, and it can be considered constant to a certain level to optimize the therapeutically effective period, for example the effective silencing period.

[0820] The drug delivery system optionally and preferably is designed to shield the nucleotide based therapeutic agent from degradation, whether chemical in nature or due to attack from enzymes and other factors in the body of the subject.

[0821] The drug delivery system of US Patent Publication 20110195123 is optionally associated with sensing and/or activation appliances that are operated at and/or after implantation of the device, by non and/or minimally invasive methods of activation and/or acceleration/deceleration, for example optionally including but not limited to thermal heating and cooling, laser beams, and ultrasonic, including focused ultrasound and/or RF (radiofrequency) methods or devices.

[0822] According to some embodiments of US Patent Publication 20110195123, the site for local delivery may optionally include target sites characterized by high abnormal proliferation of cells, and suppressed apoptosis, including tumors, active and or chronic inflammation and infection including autoimmune diseases states, degenerating tissue including muscle and nervous tissue, chronic pain, degenerative sites, and location of bone fractures and other wound locations for enhancement of regeneration of tissue, and injured cardiac, smooth and striated muscle.

[0823] The site for implantation of the composition, or target site, preferably features a radius, area and/or volume that is sufficiently small for targeted local delivery. For example, the target site optionally has a diameter in a range of from about 0.1 mm to about 5 cm.

[0824] The location of the target site is preferably selected for maximum therapeutic efficacy. For example, the composition of the drug delivery system (optionally with a device for implantation as described above) is optionally and preferably implanted within or in the proximity of a tumor environment, or the blood supply associated thereof.

[0825] For example the composition (optionally with the device) is optionally implanted within or in the proximity to pancreas, prostate, breast, liver, via the nipple, within the vascular system and so forth.

[0826] The target location is optionally selected from the group comprising, consisting essentially of, or consisting of (as non-limiting examples only, as optionally any site within the body may be suitable for implanting a Loder): 1. brain at degenerative sites like in Parkinson or Alzheimer disease at the basal ganglia, white and gray matter; 2. spine as in the case of amyotrophic lateral sclerosis (ALS); 3. uterine cervix to prevent HPV infection; 4. active and chronic inflammatory joints; 5. dermis as in the case of psoriasis; 6. sympathetic and sensoric nervous sites for analgesic effect; 7. Intra osseous implantation; 8. acute and chronic infection sites; 9. Intra vaginal; 10. Inner ear—auditory system, labyrinth of the inner ear, vestibular system; 11. Intra tracheal; 12. Intra-cardiac; coronary, epicardiac; 13. urinary bladder; 14. biliary system; 15. parenchymal tissue including and not limited to the kidney, liver, spleen; 16. lymph nodes; 17. salivary glands; 18. dental gums; 19. Intra-articular (into joints); 20. Intra-ocular; 21. Brain tissue; 22. Brain ventricles; 23. Cavities, including abdominal cavity (for example but without limitation, for ovary cancer); 24. Intra esophageal and 25. Intra rectal.

[0827] Optionally insertion of the system (for example a device containing the composition) is associated with injection of material to the ECM at the target site and the vicinity of that site to affect local pH and/or temperature and/or other biological factors affecting the diffusion of the drug and/or drug kinetics in the ECM, of the target site and the vicinity of such a site.

[0828] Optionally, according to some embodiments, the release of said agent could be associated with sensing and/or activation appliances that are operated prior and/or at and/or after insertion, by non and/or minimally invasive and/or else methods of activation and/or acceleration/deceleration, including laser beam, radiation, thermal heating and cooling, and ultrasonic, including focused ultrasound and/or RF (radiofrequency) methods or devices, and chemical activators.

[0829] According to other embodiments of US Patent Publication 20110195123, the drug preferably comprises a RNA, for example for localized cancer cases in breast, pancreas, brain, kidney, bladder, lung, and prostate as described below. Although exemplified with RNAi, many drugs are applicable to be encapsulated in Loder, and can be used in association with this invention, as long as such drugs can be encapsulated with the Loder substrate, such as a matrix for example, and this system may be used and/or adapted to deliver the nucleic acid-targeting system of the present invention.

[0830] As another example of a specific application, neuro and muscular degenerative diseases develop due to abnormal gene expression. Local delivery of RNAs may have therapeutic properties for interfering with such abnormal gene expression. Local delivery of anti apoptotic, anti inflammatory and anti degenerative drugs including small drugs and macromolecules may also optionally be therapeutic. In such cases the Loder is applied for prolonged release at constant rate and/or through a dedicated device that is implanted separately. All of this may be used and/or adapted to the nucleic acid-targeting system of the present invention.

[0831] As yet another example of a specific application, psychiatric and cognitive disorders are treated with gene modifiers. Gene knockdown is a treatment option. Loders locally delivering agents to central nervous system sites are therapeutic options for psychiatric and cognitive disorders including but not limited to psychosis, bi-polar diseases, neurotic disorders and behavioral maladies. The Loders could also deliver locally drugs including small drugs and macromolecules upon implantation at specific brain sites. All of this may be used and/or adapted to the nucleic acid-targeting system of the present invention.

[0832] As another example of a specific application, silencing of innate and/or adaptive immune mediators at local sites enables the prevention of organ transplant rejection. Local delivery of RNAs and immunomodulating reagents with the Loder implanted into the transplanted organ and/or the implanted site renders local immune suppression by repelling immune cells such as CD8 activated against the transplanted organ. All of this may be used/and or adapted to the nucleic acid-targeting system of the present invention.

[0833] As another example of a specific application, vascular growth factors including VEGFs and angiogenin and others are essential for neovascularization. Local delivery of the factors, peptides, peptidomimetics, or suppressing their repressors is an important therapeutic modality; silencing the repressors and local delivery of the factors, peptides, macromolecules and small drugs stimulating angiogenesis with the Loder is therapeutic for peripheral, systemic and cardiac vascular disease.

[0834] The method of insertion, such as implantation, may optionally already be used for other types of tissue implantation and/or for insertions and/or for sampling tissues, optionally without modifications, or alternatively optionally only with non-major modifications in such methods. Such methods optionally include but are not limited to brachytherapy methods, biopsy, endoscopy with and/or without ultrasound, such as ERCP, stereotactic methods into the brain tissue, Laparoscopy, including implantation with a laparoscope into joints, abdominal organs, the bladder wall and body cavities.

[0835] Implantable device technology herein discussed can be employed with herein teachings and hence by this disclosure and the knowledge in the art, CRISPR-Cas system or components thereof or nucleic acid molecules thereof or encoding or providing components may be delivered via an implantable device.

### Patient-Specific Screening Methods

[0836] A nucleic acid-targeting system that targets RNA, e.g., trinucleotide repeats can be used to screen patients or patent samples for the presence of such repeats. The repeats can be the target of the RNA of the nucleic acid-targeting system, and if there is binding thereto by the nucleic acid-targeting system, that binding can be detected, to thereby indicate that such a repeat is present. Thus, a nucleic acid-targeting system can be used to screen patients or patient samples for the presence of the repeat. The patient can then be administered suitable compound(s) to address the condition; or, can be administered a nucleic acid-targeting system to bind to and cause insertion, deletion or mutation and alleviate the condition.

[0837] The invention uses nucleic acids to bind target RNA sequences.

CRISPR Effector Protein mRNA and Guide RNA

[0838] CRISPR effector protein mRNA and guide RNA might also be delivered separately. CRISPR effector protein mRNA can be delivered prior to the guide RNA to give time for CRISPR effector protein to be expressed. CRISPR effector protein mRNA might be administered 1-12 hours (preferably around 2-6 hours) prior to the administration of guide RNA.

[0839] Alternatively, CRISPR effector protein mRNA and guide RNA can be administered together. Advantageously, a second booster dose of guide RNA can be administered 1-12 hours (preferably around 2-6 hours) after the initial administration of CRISPR effector protein mRNA+guide RNA.

[0840] The CRISPR effector protein of the present invention, i.e. a Cas13c effector protein is sometimes referred to herein as a CRISPR Enzyme. It will be appreciated that the effector protein is based on or derived from an enzyme, so the term ‘effector protein’ certainly includes ‘enzyme’ in some embodiments. However, it will also be appreciated that the effector protein may, as required in some embodiments, have DNA or RNA binding, but not necessarily cutting or nicking, activity, including a dead-Cas effector protein function.

[0841] Additional administrations of CRISPR effector protein mRNA and/or guide RNA might be useful to achieve the most efficient levels of genome modification. In some embodiments, phenotypic alteration is preferably the result of genome modification when a genetic disease is targeted, especially in methods of therapy and preferably where a repair template is provided to correct or alter the phenotype.

[0842] In some embodiments diseases that may be targeted include those concerned with disease-causing splice defects.

[0843] In some embodiments, cellular targets include Hemopoietic Stem/Progenitor Cells (CD34+); Human T cells; and Eye (retinal cells)—for example photoreceptor precursor cells.

[0844] In some embodiments Gene targets include: Human Beta Globin—HBB (for treating Sickle Cell Anemia, including by stimulating gene-conversion (using closely related HBD gene as an endogenous template)); CD3 (T-Cells); and CEP920—retina (eye).

[0845] In some embodiments disease targets also include: cancer; Sickle Cell Anemia (based on a point mutation); HIV; Beta-Thalassemia; and ophthalmic or ocular disease—for example Leber Congenital Amaurosis (LCA)-causing Splice Defect.

[0846] In some embodiments delivery methods include: Cationic Lipid Mediated “direct” delivery of Enzyme-Guide complex (RiboNucleoProtein) and electroporation of plasmid DNA.

[0847] Inventive methods can further comprise delivery of templates, such as repair templates, which may be dsODN or ssODN, see below. Delivery of templates may be via the cotemporaneous or separate from delivery of any or all the CRISPR effector protein or guide and via the same delivery mechanism or different. In some embodiments, it is preferred that the template is delivered together with the guide, and, preferably, also the CRISPR effector protein. An example may be an AAV vector.

[0848] Inventive methods can further comprise: (a) delivering to the cell a double-stranded oligodeoxynucleotide (dsODN) comprising overhangs complimentary to the overhangs created by said double strand break, wherein said dsODN is integrated into the locus of interest; or—(b) delivering to the cell a single-stranded oligodeoxynucleotide (ssODN), wherein said ssODN acts as a template for homology directed repair of said double strand break. Inventive methods can be for the prevention or treatment of disease in an individual, optionally wherein said disease is caused by a defect in said locus of interest. Inventive methods can be conducted in vivo in the individual or ex vivo on a cell taken from the individual, optionally wherein said cell is returned to the individual.

[0849] For minimization of toxicity and off-target effect, it will be important to control the concentration of CRISPR effector protein mRNA and guide RNA delivered. Optimal concentrations of CRISPR effector protein mRNA and guide RNA can be determined by testing different concentrations in a cellular or animal model and using deep sequencing the analyze the extent of modification at potential off-target genomic loci. For example, for the guide sequence targeting 5′-GAGTCCGAGCAGAAGAAGAA-3′(SEQ ID No. 21) in the EMX1 gene of the human genome, deep sequencing can be used to assess the level of modification at the following two off-target loci, 1: 5′-GAGTCCTAGCAGGAGAAGAA-3′ (SEQ ID No. 22) and 2: 5′-GAGTCTAAGCAGAAGAAGAA-3′ (SEQ ID No. 23). The concentration that gives the highest level of on-target modification while minimizing the level of off-target modification should be chosen for in vivo delivery.

### Inducible Systems

[0850] In some embodiments, a CRISPR effector protein may form a component of an inducible system. The inducible nature of the system would allow for spatiotemporal control of gene editing or gene expression using a form of energy. The form of energy may include but is not limited to electromagnetic radiation, sound energy, chemical energy and thermal energy. Examples of inducible system include tetracycline inducible promoters (Tet-On or Tet-Off), small molecule two-hybrid transcription activations systems (FKBP, ABA, etc), or light inducible systems (Phytochrome, LOV domains, or cryptochrome). In one embodiment, the CRISPR effector protein may be a part of a Light Inducible Transcriptional Effector (LITE) to direct changes in transcriptional activity in a sequence-specific manner. The components of a light may include a CRISPR effector protein, a light-responsive cytochrome heterodimer (e.g. from Arabidopsis thaliana), and a transcriptional activation/repression domain. Further examples of inducible DNA binding proteins and methods for their use are provided in U.S. 61/736,465 and U.S. 61/721,283, and WO 2014018423 A2 which is hereby incorporated by reference in its entirety.

### Exemplary Methods of Using of CRISPR Cas System

[0851] The invention provides a non-naturally occurring or engineered composition, or one or more polynucleotides encoding components of said composition, or vector or delivery systems comprising one or more polynucleotides encoding components of said composition for use in a modifying a target cell in vivo, ex vivo or in vitro and, may be conducted in a manner alters the cell such that once modified the progeny or cell line of the CRISPR modified cell retains the altered phenotype. The modified cells and progeny may be part of a multi-cellular organism such as a plant or animal with ex vivo or in vivo application of CRISPR system to desired cell types. The CRISPR invention may be a therapeutic method of treatment. The therapeutic method of treatment may comprise gene or genome editing, or gene therapy.

Modifying a Target with CRISPR Cas System or Complex (e.g., Cas13c-RNA Complex)

[0852] In one aspect, the invention provides for methods of modifying a target polynucleotide in a eukaryotic cell, which may be in vivo, ex vivo or in vitro. In some embodiments, the method comprises sampling a cell or population of cells from a human or non-human animal, and modifying the cell or cells. Culturing may occur at any stage ex vivo. The cell or cells may even be re-introduced into the non-human animal or plant. For re-introduced cells it is particularly preferred that the cells are stem cells.

[0853] In some embodiments, the method comprises allowing a CRISPR complex to bind to the target polynucleotide to effect cleavage of said target polynucleotide thereby modifying the target polynucleotide, wherein the CRISPR complex comprises a CRISPR effector protein complexed with a guide sequence hybridized or hybridizable to a target sequence within said target polynucleotide.

[0854] In one aspect, the invention provides a method of modifying expression of a polynucleotide in a eukaryotic cell. In some embodiments, the method comprises allowing a CRISPR complex to bind to the polynucleotide such that said binding results in increased or decreased expression of said polynucleotide; wherein the CRISPR complex comprises a CRISPR effector protein complexed with a guide sequence hybridized or hybridizable to a target sequence within said polynucleotide. Similar considerations and conditions apply as above for methods of modifying a target polynucleotide. In fact, these sampling, culturing and re-introduction options apply across the aspects of the present invention.

[0855] Indeed, in any aspect of the invention, the CRISPR complex may comprise a CRISPR effector protein complexed with a guide sequence hybridized or hybridizable to a target sequence. Similar considerations and conditions apply as above for methods of modifying a target polynucleotide.

[0856] Thus in any of the non-naturally-occurring CRISPR effector proteins described herein comprise at least one modification and whereby the effector protein has certain improved capabilities. In particular, any of the effector proteins are capable of forming a CRISPR complex with a guide RNA. When such a complex forms, the guide RNA is capable of binding to a target polynucleotide sequence and the effector protein is capable of modifying a target locus. In addition, the effector protein in the CRISPR complex has reduced capability of modifying one or more off-target loci as compared to an unmodified enzyme/effector protein.

[0857] In addition, the modified CRISPR enzymes described herein encompass enzymes whereby in the CRISPR complex the effector protein has increased capability of modifying the one or more target loci as compared to an unmodified enzyme/effector protein. Such function may be provided separate to or provided in combination with the above-described function of reduced capability of modifying one or more off-target loci. Any such effector proteins may be provided with any of the further modifications to the CRISPR effector protein as described herein, such as in combination with any activity provided by one or more associated heterologous functional domains, any further mutations to reduce nuclease activity and the like.

[0858] In advantageous embodiments of the invention, the modified CRISPR effector protein is provided with reduced capability of modifying one or more off-target loci as compared to an unmodified enzyme/effector protein and increased capability of modifying the one or more target loci as compared to an unmodified enzyme/effector protein. In combination with further modifications to the effector protein, significantly enhanced specificity may be achieved. For example, combination of such advantageous embodiments with one or more additional mutations is provided wherein the one or more additional mutations are in one or more catalytically active domains. In such effector proteins, enhanced specificity may be achieved due to an improved specificity in terms of effector protein activity.

[0859] Additional functionalities which may be engineered into modified CRISPR effector proteins as described herein include the following. 1. modified CRISPR effector proteins that disrupt RNA:protein interactions without affecting protein tertiary or secondary structure. This includes residues that contact any part of the RNA:RNA duplex. 2. modified CRISPR effector proteins that weaken intra-protein interactions holding Cas13c in conformation essential for nuclease cutting in response to RNA binding (on or off target). For example: a modification that mildly inhibits, but still allows, the nuclease conformation of the HNH domain (positioned at the scissile phosphate). 3. modified CRISPR effector proteins that strengthen intra-protein interactions holding Cas13c in a conformation inhibiting nuclease activity in response to RNA binding (on or off targets). For example: a modification that stabilizes the HNH domain in a conformation away from the scissile phosphate. Any such additional functional enhancement may be provided in combination with any other modification to the CRISPR effector protein as described in detail elsewhere herein.

[0860] Any of the herein described improved functionalities may be made to any CRISPR effector protein, such as a Cas13c effector protein. However, it will be appreciated that any of the functionalities described herein may be engineered into Cas13c effector proteins from other orthologs, including chimeric effector proteins comprising fragments from multiple orthologs.

[0861] The invention uses nucleic acids to bind target DNA sequences. This is advantageous as nucleic acids are much easier and cheaper to produce than proteins, and the specificity can be varied according to the length of the stretch where homology is sought. Complex 3-D positioning of multiple fingers, for example is not required. The terms “polynucleotide”, “nucleotide”, “nucleotide sequence”, “nucleic acid” and “oligonucleotide” are used interchangeably. They refer to a polymeric form of nucleotides of any length, either deoxyribonucleotides or ribonucleotides, or analogs thereof. Polynucleotides may have any three dimensional structure, and may perform any function, known or unknown. The following are non-limiting examples of polynucleotides: coding or non-coding regions of a gene or gene fragment, loci (locus) defined from linkage analysis, exons, introns, messenger RNA (mRNA), transfer RNA, ribosomal RNA, short interfering RNA (siRNA), short-hairpin RNA (shRNA), micro-RNA (miRNA), ribozymes, cDNA, recombinant polynucleotides, branched polynucleotides, plasmids, vectors, isolated DNA of any sequence, isolated RNA of any sequence, nucleic acid probes, and primers. The term also encompasses nucleic-acid-like structures with synthetic backbones, see, e.g., Eckstein, 1991; Baserga et al., 1992; Milligan, 1993; WO 97/03211; WO 96/39154; Mata, 1997; Strauss-Soukup, 1997; and Samstag, 1996. A polynucleotide may comprise one or more modified nucleotides, such as methylated nucleotides and nucleotide analogs. If present, modifications to the nucleotide structure may be imparted before or after assembly of the polymer. The sequence of nucleotides may be interrupted by non-nucleotide components. A polynucleotide may be further modified after polymerization, such as by conjugation with a labeling component. As used herein the term “wild type” is a term of the art understood by skilled persons and means the typical form of an organism, strain, gene or characteristic as it occurs in nature as distinguished from mutant or variant forms. A “wild type” can be a base line. As used herein the term “variant” should be taken to mean the exhibition of qualities that have a pattern that deviates from what occurs in nature. The terms “non-naturally occurring” or “engineered” are used interchangeably and indicate the involvement of the hand of man. The terms, when referring to nucleic acid molecules or polypeptides mean that the nucleic acid molecule or the polypeptide is at least substantially free from at least one other component with which they are naturally associated in nature and as found in nature. “Complementarity” refers to the ability of a nucleic acid to form hydrogen bond(s) with another nucleic acid sequence by either traditional Watson-Crick base pairing or other non-traditional types. A percent complementarity indicates the percentage of residues in a nucleic acid molecule which can form hydrogen bonds (e.g., Watson-Crick base pairing) with a second nucleic acid sequence (e.g., 5, 6, 7, 8, 9, 10 out of 10 being 50%, 60%, 70%, 80%, 90%, and 100% complementary). “Perfectly complementary” means that all the contiguous residues of a nucleic acid sequence will hydrogen bond with the same number of contiguous residues in a second nucleic acid sequence. “Substantially complementary” as used herein refers to a degree of complementarity that is at least 60%, 65%, 70%, 75%, 80%, 85%, 90%, 95%, 97%, 98%, 99%, or 100% over a region of 8, 9, 10, 11, 12, 13, 14, 15, 16, 17, 18, 19, 20, 21, 22, 23, 24, 25, 30, 35, 40, 45, 50, or more nucleotides, or refers to two nucleic acids that hybridize under stringent conditions. As used herein, “stringent conditions” for hybridization refer to conditions under which a nucleic acid having complementarity to a target sequence predominantly hybridizes with the target sequence, and substantially does not hybridize to non-target sequences. Stringent conditions are generally sequence-dependent, and vary depending on a number of factors. In general, the longer the sequence, the higher the temperature at which the sequence specifically hybridizes to its target sequence. Non-limiting examples of stringent conditions are described in detail in Tijssen (1993), Laboratory Techniques In Biochemistry And Molecular Biology-Hybridization With Nucleic Acid Probes Part I, Second Chapter “Overview of principles of hybridization and the strategy of nucleic acid probe assay”, Elsevier, N.Y. Where reference is made to a polynucleotide sequence, then complementary or partially complementary sequences are also envisaged. These are preferably capable of hybridizing to the reference sequence under highly stringent conditions. Generally, in order to maximize the hybridization rate, relatively low-stringency hybridization conditions are selected: about 20 to 25° C. lower than the thermal melting point (Tₘ). The Tₘ is the temperature at which 50% of specific target sequence hybridizes to a perfectly complementary probe in solution at a defined ionic strength and pH. Generally, in order to require at least about 85% nucleotide complementarity of hybridized sequences, highly stringent washing conditions are selected to be about 5 to 15° C. lower than the Tₘ. In order to require at least about 70% nucleotide complementarity of hybridized sequences, moderately-stringent washing conditions are selected to be about 15 to 30° C. lower than the Tₘ. Highly permissive (very low stringency) washing conditions may be as low as 50° C. below the Tₘ, allowing a high level of mis-matching between hybridized sequences. Those skilled in the art will recognize that other physical and chemical parameters in the hybridization and wash stages can also be altered to affect the outcome of a detectable hybridization signal from a specific level of homology between target and probe sequences. Preferred highly stringent conditions comprise incubation in 50% formamide, 5×SSC, and 1% SDS at 42° C., or incubation in 5×SSC and 1% SDS at 65° C., with wash in 0.2×SSC and 0.1% SDS at 65° C. “Hybridization” refers to a reaction in which one or more polynucleotides react to form a complex that is stabilized via hydrogen bonding between the bases of the nucleotide residues. The hydrogen bonding may occur by Watson Crick base pairing, Hoogstein binding, or in any other sequence specific manner. The complex may comprise two strands forming a duplex structure, three or more strands forming a multi stranded complex, a single self-hybridizing strand, or any combination of these. A hybridization reaction may constitute a step in a more extensive process, such as the initiation of PCR, or the cleavage of a polynucleotide by an enzyme. A sequence capable of hybridizing with a given sequence is referred to as the “complement” of the given sequence. As used herein, the term “genomic locus” or “locus” (plural loci) is the specific location of a gene or DNA sequence on a chromosome. A “gene” refers to stretches of DNA or RNA that encode a polypeptide or an RNA chain that has functional role to play in an organism and hence is the molecular unit of heredity in living organisms. For the purpose of this invention it may be considered that genes include regions which regulate the production of the gene product, whether or not such regulatory sequences are adjacent to coding and/or transcribed sequences. Accordingly, a gene includes, but is not necessarily limited to, promoter sequences, terminators, translational regulatory sequences such as ribosome binding sites and internal ribosome entry sites, enhancers, silencers, insulators, boundary elements, replication origins, matrix attachment sites and locus control regions. As used herein, “expression of a genomic locus” or “gene expression” is the process by which information from a gene is used in the synthesis of a functional gene product. The products of gene expression are often proteins, but in non-protein coding genes such as rRNA genes or tRNA genes, the product is functional RNA. The process of gene expression is used by all known life-eukaryotes (including multicellular organisms), prokaryotes (bacteria and archaea) and viruses to generate functional products to survive. As used herein “expression” of a gene or nucleic acid encompasses not only cellular gene expression, but also the transcription and translation of nucleic acid(s) in cloning systems and in any other context. As used herein, “expression” also refers to the process by which a polynucleotide is transcribed from a DNA template (such as into and mRNA or other RNA transcript) and/or the process by which a transcribed mRNA is subsequently translated into peptides, polypeptides, or proteins. Transcripts and encoded polypeptides may be collectively referred to as “gene product.” If the polynucleotide is derived from genomic DNA, expression may include splicing of the mRNA in a eukaryotic cell. The terms “polypeptide”, “peptide” and “protein” are used interchangeably herein to refer to polymers of amino acids of any length. The polymer may be linear or branched, it may comprise modified amino acids, and it may be interrupted by non-amino acids. The terms also encompass an amino acid polymer that has been modified; for example, disulfide bond formation, glycosylation, lipidation, acetylation, phosphorylation, or any other manipulation, such as conjugation with a labeling component. As used herein the term “amino acid” includes natural and/or unnatural or synthetic amino acids, including glycine and both the D or L optical isomers, and amino acid analogs and peptidomimetics. As used herein, the term “domain” or “protein domain” refers to a part of a protein sequence that may exist and function independently of the rest of the protein chain. As described in aspects of the invention, sequence identity is related to sequence homology. Homology comparisons may be conducted by eye, or more usually, with the aid of readily available sequence comparison programs. These commercially available computer programs may calculate percent (%) homology between two or more sequences and may also calculate the sequence identity shared by two or more amino acid or nucleic acid sequences.

[0862] In aspects of the invention the term “guide RNA”, refers to the polynucleotide sequence comprising one or more of a putative or identified tracr sequence and a putative or identified crRNA sequence or guide sequence. In particular embodiments, the “guide RNA” comprises a putative or identified crRNA sequence or guide sequence. In further embodiments, the guide RNA does not comprise a putative or identified tracr sequence.

[0863] As used herein the term “wild type” is a term of the art understood by skilled persons and means the typical form of an organism, strain, gene or characteristic as it occurs in nature as distinguished from mutant or variant forms. A “wild type” can be a base line.

[0864] As used herein the term “variant” should be taken to mean the exhibition of qualities that have a pattern that deviates from what occurs in nature.

[0865] The terms “non-naturally occurring” or “engineered” are used interchangeably and indicate the involvement of the hand of man. The terms, when referring to nucleic acid molecules or polypeptides mean that the nucleic acid molecule or the polypeptide is at least substantially free from at least one other component with which they are naturally associated in nature and as found in nature. In all aspects and embodiments, whether they include these terms or not, it will be understood that, preferably, the may be optional and thus preferably included or not preferably not included. Furthermore, the terms “non-naturally occurring” and “engineered” may be used interchangeably and so can therefore be used alone or in combination and one or other may replace mention of both together. In particular, “engineered” is preferred in place of “non-naturally occurring” or “non-naturally occurring and/or engineered.”

[0866] Sequence homologies may be generated by any of a number of computer programs known in the art, for example BLAST or FASTA, etc. A suitable computer program for carrying out such an alignment is the GCG Wisconsin Bestfit package (University of Wisconsin, U.S.A.; Devereux et al., 1984, Nucleic Acids Research 12:387). Examples of other software than may perform sequence comparisons include, but are not limited to, the BLAST package (see Ausubel et al., 1999 ibid—Chapter 18), FASTA (Atschul et al., 1990, J. Mol. Biol., 403-410) and the GENEWORKS suite of comparison tools. Both BLAST and FASTA are available for offline and online searching (see Ausubel et al., 1999 ibid, pages 7-58 to 7-60). However it is preferred to use the GCG Bestfit program. Percentage (%) sequence homology may be calculated over contiguous sequences, i.e., one sequence is aligned with the other sequence and each amino acid or nucleotide in one sequence is directly compared with the corresponding amino acid or nucleotide in the other sequence, one residue at a time. This is called an “ungapped” alignment. Typically, such ungapped alignments are performed only over a relatively short number of residues. Although this is a very simple and consistent method, it fails to take into consideration that, for example, in an otherwise identical pair of sequences, one insertion or deletion may cause the following amino acid residues to be put out of alignment, thus potentially resulting in a large reduction in % homology when a global alignment is performed. Consequently, most sequence comparison methods are designed to produce optimal alignments that take into consideration possible insertions and deletions without unduly penalizing the overall homology or identity score. This is achieved by inserting “gaps” in the sequence alignment to try to maximize local homology or identity. However, these more complex methods assign “gap penalties” to each gap that occurs in the alignment so that, for the same number of identical amino acids, a sequence alignment with as few gaps as possible—reflecting higher relatedness between the two compared sequences—may achieve a higher score than one with many gaps. “Affinity gap costs” are typically used that charge a relatively high cost for the existence of a gap and a smaller penalty for each subsequent residue in the gap. This is the most commonly used gap scoring system. High gap penalties may, of course, produce optimized alignments with fewer gaps. Most alignment programs allow the gap penalties to be modified. However, it is preferred to use the default values when using such software for sequence comparisons. For example, when using the GCG Wisconsin Bestfit package the default gap penalty for amino acid sequences is −12 for a gap and −4 for each extension. Calculation of maximum % homology therefore first requires the production of an optimal alignment, taking into consideration gap penalties. A suitable computer program for carrying out such an alignment is the GCG Wisconsin Bestfit package (Devereux et al., 1984 Nuc. Acids Research 12 p 387). Examples of other software than may perform sequence comparisons include, but are not limited to, the BLAST package (see Ausubel et al., 1999 Short Protocols in Molecular Biology, 4^{th} Ed.—Chapter 18), FASTA (Altschul et al., 1990 J. Mol. Biol. 403-410) and the GENEWORKS suite of comparison tools. Both BLAST and FASTA are available for offline and online searching (see Ausubel et al., 1999, Short Protocols in Molecular Biology, pages 7-58 to 7-60). However, for some applications, it is preferred to use the GCG Bestfit program. A new tool, called BLAST 2 Sequences is also available for comparing protein and nucleotide sequences (see FEMS Microbiol Lett. 1999 174(2): 247-50; FEMS Microbiol Lett. 1999 177(1): 187-8 and the website of the National Center for Biotechnology information at the website of the National Institutes for Health). Although the final % homology may be measured in terms of identity, the alignment process itself is typically not based on an all-or-nothing pair comparison. Instead, a scaled similarity score matrix is generally used that assigns scores to each pair-wise comparison based on chemical similarity or evolutionary distance. An example of such a matrix commonly used is the BLOSUM62 matrix—the default matrix for the BLAST suite of programs. GCG Wisconsin programs generally use either the public default values or a custom symbol comparison table, if supplied (see user manual for further details). For some applications, it is preferred to use the public default values for the GCG package, or in the case of other software, the default matrix, such as BLOSUM62. Alternatively, percentage homologies may be calculated using the multiple alignment feature in DNASIS™ (Hitachi Software), based on an algorithm, analogous to CLUSTAL (Higgins D G & Sharp P M (1988), Gene 73(1), 237-244). Once the software has produced an optimal alignment, it is possible to calculate % homology, preferably % sequence identity. The software typically does this as part of the sequence comparison and generates a numerical result. The sequences may also have deletions, insertions or substitutions of amino acid residues which produce a silent change and result in a functionally equivalent substance. Deliberate amino acid substitutions may be made on the basis of similarity in amino acid properties (such as polarity, charge, solubility, hydrophobicity, hydrophilicity, and/or the amphipathic nature of the residues) and it is therefore useful to group amino acids together in functional groups. Amino acids may be grouped together based on the properties of their side chains alone. However, it is more useful to include mutation data as well. The sets of amino acids thus derived are likely to be conserved for structural reasons. These sets may be described in the form of a Venn diagram (Livingstone C. D. and Barton G. J. (1993) “Protein sequence alignments: a strategy for the hierarchical analysis of residue conservation” Comput. Appl. Biosci. 9: 745-756) (Taylor W. R. (1986) “The classification of amino acid conservation” J. Theor. Biol. 119; 205-218). Conservative substitutions may be made, for example according to the table below which describes a generally accepted Venn diagram grouping of amino acids.

| Set | | Sub-set | |
|---|---|---|---|
| Hydro- | FWYHKMILVAGC | Aromatic | FWYH (SEQ ID |
| phobic | (SEQ ID No. | | No. 27) |
| | 24) | Aliphatic | ILV |
| Polar | WYHKREDCSTNQ | Charged | HKRED |
| | (SEQ ID No. | | (SEQ ID No. 28) |
| | 25) | Positively | HKR |
| | | charged | |
| | | Negatively | ED |
| | | charged | |
| Small | VCAGSPTND | Tiny | AGS |
| | (SEQ ID No. | | |
| | 26) | | |

[0867] The terms “subject,” “individual,” and “patient” are used interchangeably herein to refer to a vertebrate, preferably a mammal, more preferably a human. Mammals include, but are not limited to, murines, simians, humans, farm animals, sport animals, and pets. Tissues, cells and their progeny of a biological entity obtained in vivo or cultured in vitro are also encompassed.

[0868] The terms “therapeutic agent”, “therapeutic capable agent” or “treatment agent” are used interchangeably and refer to a molecule or compound that confers some beneficial effect upon administration to a subject. The beneficial effect includes enablement of diagnostic determinations; amelioration of a disease, symptom, disorder, or pathological condition; reducing or preventing the onset of a disease, symptom, disorder or condition; and generally counteracting a disease, symptom, disorder or pathological condition.

[0869] As used herein, “treatment” or “treating,” or “palliating” or “ameliorating” are used interchangeably. These terms refer to an approach for obtaining beneficial or desired results including but not limited to a therapeutic benefit and/or a prophylactic benefit. By therapeutic benefit is meant any therapeutically relevant improvement in or effect on one or more diseases, conditions, or symptoms under treatment. For prophylactic benefit, the compositions may be administered to a subject at risk of developing a particular disease, condition, or symptom, or to a subject reporting one or more of the physiological symptoms of a disease, even though the disease, condition, or symptom may not have yet been manifested.

[0870] The term “effective amount” or “therapeutically effective amount” refers to the amount of an agent that is sufficient to effect beneficial or desired results. The therapeutically effective amount may vary depending upon one or more of: the subject and disease condition being treated, the weight and age of the subject, the severity of the disease condition, the manner of administration and the like, which can readily be determined by one of ordinary skill in the art. The term also applies to a dose that will provide an image for detection by any one of the imaging methods described herein. The specific dose may vary depending on one or more of: the particular agent chosen, the dosing regimen to be followed, whether it is administered in combination with other compounds, timing of administration, the tissue to be imaged, and the physical delivery system in which it is carried.

[0871] The practice of the present invention employs, unless otherwise indicated, conventional techniques of immunology, biochemistry, chemistry, molecular biology, microbiology, cell biology, genomics and recombinant DNA, which are within the skill of the art. See Sambrook, Fritsch and Maniatis, MOLECULAR CLONING: A LABORATORY MANUAL, 2nd edition (1989); CURRENT PROTOCOLS IN MOLECULAR BIOLOGY (F. M. Ausubel, et al. eds., (1987)); the series METHODS IN ENZYMOLOGY (Academic Press, Inc.): PCR 2: A PRACTICAL APPROACH (M. J. MacPherson, B. D. Hames and G. R. Taylor eds. (1995)), Harlow and Lane, eds. (1988) ANTIBODIES, A LABORATORY MANUAL, and ANIMAL CELL CULTURE (R. I. Freshney, ed. (1987)).

[0872] Several aspects of the invention relate to vector systems comprising one or more vectors, or vectors as such. Vectors can be designed for expression of CRISPR transcripts (e.g. nucleic acid transcripts, proteins, or enzymes) in prokaryotic or eukaryotic cells. For example, CRISPR transcripts can be expressed in bacterial cells such as Escherichia coli, insect cells (using baculovirus expression vectors), yeast cells, or mammalian cells. Suitable host cells are discussed further in Goeddel, GENE EXPRESSION TECHNOLOGY: METHODS IN ENZYMOLOGY 185, Academic Press, San Diego, Calif. (1990). Alternatively, the recombinant expression vector can be transcribed and translated in vitro, for example using T7 promoter regulatory sequences and T7 polymerase.

[0873] Embodiments of the invention include sequences (both polynucleotide or polypeptide) which may comprise homologous substitution (substitution and replacement are both used herein to mean the interchange of an existing amino acid residue or nucleotide, with an alternative residue or nucleotide) that may occur i.e., like-for-like substitution in the case of amino acids such as basic for basic, acidic for acidic, polar for polar, etc. Non-homologous substitution may also occur i.e., from one class of residue to another or alternatively involving the inclusion of unnatural amino acids such as ornithine (hereinafter referred to as Z), diaminobutyric acid ornithine (hereinafter referred to as B), norleucine ornithine (hereinafter referred to as O), pyriylalanine, thienylalanine, naphthylalanine and phenylglycine. Variant amino acid sequences may include suitable spacer groups that may be inserted between any two amino acid residues of the sequence including alkyl groups such as methyl, ethyl or propyl groups in addition to amino acid spacers such as glycine or 13-alanine residues. A further form of variation, which involves the presence of one or more amino acid residues in peptoid form, may be well understood by those skilled in the art. For the avoidance of doubt, “the peptoid form” is used to refer to variant amino acid residues wherein the α-carbon substituent group is on the residue's nitrogen atom rather than the α-carbon. Processes for preparing peptides in the peptoid form are known in the art, for example Simon R J et al., PNAS (1992) 89(20), 9367-9371 and Horwell D C, Trends Biotechnol. (1995) 13(4), 132-134.

[0874] Homology modelling: Corresponding residues in other Cas13c orthologs can be identified by the methods of Zhang et al., 2012 (Nature; 490(7421): 556-60) and Chen et al., 2015 (PLoS Comput Biol; 11(5): e1004248)—a computational protein-protein interaction (PPI) method to predict interactions mediated by domain-motif interfaces. PrePPI (Predicting PPI), a structure based PPI prediction method, combines structural evidence with non-structural evidence using a Bayesian statistical framework. The method involves taking a pair a query proteins and using structural alignment to identify structural representatives that correspond to either their experimentally determined structures or homology models. Structural alignment is further used to identify both close and remote structural neighbors by considering global and local geometric relationships. Whenever two neighbors of the structural representatives form a complex reported in the Protein Data Bank, this defines a template for modelling the interaction between the two query proteins. Models of the complex are created by superimposing the representative structures on their corresponding structural neighbor in the template. This approach is further described in Dey et al., 2013 (Prot Sci; 22: 359-66).

[0875] For purpose of this invention, amplification means any method employing a primer and a polymerase capable of replicating a target sequence with reasonable fidelity. Amplification may be carried out by natural or recombinant DNA polymerases such as TaqGold™, T7 DNA polymerase, Klenow fragment of E. coli DNA polymerase, and reverse transcriptase. A preferred amplification method is PCR.

[0876] In certain aspects the invention involves vectors. A used herein, a “vector” is a tool that allows or facilitates the transfer of an entity from one environment to another. It is a replicon, such as a plasmid, phage, or cosmid, into which another DNA segment may be inserted so as to bring about the replication of the inserted segment. Generally, a vector is capable of replication when associated with the proper control elements. In general, the term “vector” refers to a nucleic acid molecule capable of transporting another nucleic acid to which it has been linked. Vectors include, but are not limited to, nucleic acid molecules that are single-stranded, double-stranded, or partially double-stranded; nucleic acid molecules that comprise one or more free ends, no free ends (e.g., circular); nucleic acid molecules that comprise DNA, RNA, or both; and other varieties of polynucleotides known in the art. One type of vector is a “plasmid,” which refers to a circular double stranded DNA loop into which additional DNA segments can be inserted, such as by standard molecular cloning techniques. Another type of vector is a viral vector, wherein virally-derived DNA or RNA sequences are present in the vector for packaging into a virus (e.g., retroviruses, replication defective retroviruses, adenoviruses, replication defective adenoviruses, and adeno-associated viruses (AAVs)). Viral vectors also include polynucleotides carried by a virus for transfection into a host cell. Certain vectors are capable of autonomous replication in a host cell into which they are introduced (e.g., bacterial vectors having a bacterial origin of replication and episomal mammalian vectors). Other vectors (e.g., non-episomal mammalian vectors) are integrated into the genome of a host cell upon introduction into the host cell, and thereby are replicated along with the host genome. Moreover, certain vectors are capable of directing the expression of genes to which they are operatively-linked. Such vectors are referred to herein as “expression vectors.” Common expression vectors of utility in recombinant DNA techniques are often in the form of plasmids.

[0877] Recombinant expression vectors can comprise a nucleic acid of the invention in a form suitable for expression of the nucleic acid in a host cell, which means that the recombinant expression vectors include one or more regulatory elements, which may be selected on the basis of the host cells to be used for expression, that is operatively-linked to the nucleic acid sequence to be expressed. Within a recombinant expression vector, “operably linked” is intended to mean that the nucleotide sequence of interest is linked to the regulatory element(s) in a manner that allows for expression of the nucleotide sequence (e.g., in an in vitro transcription/translation system or in a host cell when the vector is introduced into the host cell). With regards to recombination and cloning methods, mention is made of U.S. patent application Ser. No. 10/815,730, published Sep. 2, 2004 as US 2004-0171156 A1, the contents of which are herein incorporated by reference in their entirety.

[0878] Aspects of the invention relate to bicistronic vectors for guide RNA and wild type, modified or mutated CRISPR effector proteins/enzymes (e.g. Cas13c). Bicistronic expression vectors for guide RNA and wild type, modified or mutated CRISPR effector proteins/enzymes (e.g. Cas13c) are preferred. In general and particularly in this embodimentwild type, modified or mutated CRISPR effector proteins/enzymes (e.g. Cas13c) is preferably driven by the CBh promoter. The RNA may preferably be driven by a Pol III promoter, such as a U6 promoter. Ideally the two are combined.

[0879] In some embodiments, a loop in the guide RNA is provided. This may be a stem loop or a tetra loop. The loop is preferably GAAA, but it is not limited to this sequence or indeed to being only 4 bp in length. Indeed, preferred loop forming sequences for use in hairpin structures are four nucleotides in length, and most preferably have the sequence GAAA. However, longer or shorter loop sequences may be used, as may alternative sequences. The sequences preferably include a nucleotide triplet (for example, AAA), and an additional nucleotide (for example C or G). Examples of loop forming sequences include CAAA and AAAG.

[0880] In practicing any of the methods disclosed herein, a suitable vector can be introduced to a cell or an embryo via one or more methods known in the art, including without limitation, microinjection, electroporation, sonoporation, bioli stics, calcium phosphate-mediated transfection, cationic transfection, liposome transfection, dendrimer transfection, heat shock transfection, nucleofection transfection, magnetofection, lipofection, impalefection, optical transfection, proprietary agent-enhanced uptake of nucleic acids, and delivery via liposomes, immunoliposomes, virosomes, or artificial virions. In some methods, the vector is introduced into an embryo by microinjection. The vector or vectors may be microinjected into the nucleus or the cytoplasm of the embryo. In some methods, the vector or vectors may be introduced into a cell by nucleofection.

[0881] The term “regulatory element” is intended to include promoters, enhancers, internal ribosomal entry sites (IRES), and other expression control elements (e.g., transcription termination signals, such as polyadenylation signals and poly-U sequences). Such regulatory elements are described, for example, in Goeddel, GENE EXPRESSION TECHNOLOGY: METHODS IN ENZYMOLOGY 185, Academic Press, San Diego, Calif (1990). Regulatory elements include those that direct constitutive expression of a nucleotide sequence in many types of host cell and those that direct expression of the nucleotide sequence only in certain host cells (e.g., tissue-specific regulatory sequences). A tissue-specific promoter may direct expression primarily in a desired tissue of interest, such as muscle, neuron, bone, skin, blood, specific organs (e.g., liver, pancreas), or particular cell types (e.g., lymphocytes). Regulatory elements may also direct expression in a temporal-dependent manner, such as in a cell-cycle dependent or developmental stage-dependent manner, which may or may not also be tissue or cell-type specific. In some embodiments, a vector comprises one or more pol III promoter (e.g., 1, 2, 3, 4, 5, or more pol III promoters), one or more pol II promoters (e.g., 1, 2, 3, 4, 5, or more pol II promoters), one or more pol I promoters (e.g., 1, 2, 3, 4, 5, or more pol I promoters), or combinations thereof. Examples of pol III promoters include, but are not limited to, U6 and H1 promoters. Examples of pol II promoters include, but are not limited to, the retroviral Rous sarcoma virus (RSV) LTR promoter (optionally with the RSV enhancer), the cytomegalovirus (CMV) promoter (optionally with the CMV enhancer) [see, e.g., Boshart et al, Cell, 41:521-530 (1985)], the SV40 promoter, the dihydrofolate reductase promoter, the β-actin promoter, the phosphoglycerol kinase (PGK) promoter, and the EF1α promoter. Also encompassed by the term “regulatory element” are enhancer elements, such as WPRE; CMV enhancers; the R-U5′ segment in LTR of HTLV-I (Mol. Cell. Biol., Vol. 8(1), p. 466-472, 1988); SV40 enhancer; and the intron sequence between exons 2 and 3 of rabbit β-globin (Proc. Natl. Acad. Sci. USA., Vol. 78(3), p. 1527-31, 1981). It will be appreciated by those skilled in the art that the design of the expression vector can depend on such factors as the choice of the host cell to be transformed, the level of expression desired, etc. A vector can be introduced into host cells to thereby produce transcripts, proteins, or peptides, including fusion proteins or peptides, encoded by nucleic acids as described herein (e.g., clustered regularly interspersed short palindromic repeats (CRISPR) transcripts, proteins, enzymes, mutant forms thereof, fusion proteins thereof, etc.). With regards to regulatory sequences, mention is made of U.S. patent application Ser. No. 10/491,026, the contents of which are incorporated by reference herein in their entirety. With regards to promoters, mention is made of PCT publication WO 2011/028929 and U.S. application Ser. No. 12/511,940, the contents of which are incorporated by reference herein in their entirety.

[0882] Vectors can be designed for expression of CRISPR transcripts (e.g., nucleic acid transcripts, proteins, or enzymes) in prokaryotic or eukaryotic cells. For example, CRISPR transcripts can be expressed in bacterial cells such as Escherichia coli, insect cells (using baculovirus expression vectors), yeast cells, or mammalian cells. Suitable host cells are discussed further in Goeddel, GENE EXPRESSION TECHNOLOGY: METHODS IN ENZYMOLOGY 185, Academic Press, San Diego, Calif. (1990). Alternatively, the recombinant expression vector can be transcribed and translated in vitro, for example using T7 promoter regulatory sequences and T7 polymerase.

[0883] Vectors may be introduced and propagated in a prokaryote or prokaryotic cell. In some embodiments, a prokaryote is used to amplify copies of a vector to be introduced into a eukaryotic cell or as an intermediate vector in the production of a vector to be introduced into a eukaryotic cell (e.g., amplifying a plasmid as part of a viral vector packaging system). In some embodiments, a prokaryote is used to amplify copies of a vector and express one or more nucleic acids, such as to provide a source of one or more proteins for delivery to a host cell or host organism. Expression of proteins in prokaryotes is most often carried out in Escherichia coli with vectors containing constitutive or inducible promoters directing the expression of either fusion or non-fusion proteins. Fusion vectors add a number of amino acids to a protein encoded therein, such as to the amino terminus of the recombinant protein. Such fusion vectors may serve one or more purposes, such as: (i) to increase expression of recombinant protein; (ii) to increase the solubility of the recombinant protein; and (iii) to aid in the purification of the recombinant protein by acting as a ligand in affinity purification. Often, in fusion expression vectors, a proteolytic cleavage site is introduced at the junction of the fusion moiety and the recombinant protein to enable separation of the recombinant protein from the fusion moiety subsequent to purification of the fusion protein. Such enzymes, and their cognate recognition sequences, include Factor Xa, thrombin and enterokinase. Example fusion expression vectors include pGEX (Pharmacia Biotech Inc; Smith and Johnson, 1988. Gene 67: 31-40), pMAL (New England Biolabs, Beverly, Mass.) and pRIT5 (Pharmacia, Piscataway, N.J.) that fuse glutathione S-transferase (GST), maltose E binding protein, or protein A, respectively, to the target recombinant protein.

[0884] Examples of suitable inducible non-fusion E. coli expression vectors include pTrc (Amrann et al., (1988) Gene 69:301-315) and pET 11d (Studier et al., GENE EXPRESSION TECHNOLOGY: METHODS IN ENZYMOLOGY 185, Academic Press, San Diego, Calif (1990) 60-89).

[0885] In some embodiments, a vector is a yeast expression vector. Examples of vectors for expression in yeast Saccharomyces cerivisae include pYepSec1 (Baldari, et al., 1987. EMBO J. 6: 229-234), pMFa (Kuijan and Herskowitz, 1982. Cell 30: 933-943), pJRY88 (Schultz et al., 1987. Gene 54: 113-123), pYES2 (Invitrogen Corporation, San Diego, Calif.), and picZ (InVitrogen Corp, San Diego, Calif.).

[0886] In some embodiments, a vector drives protein expression in insect cells using baculovirus expression vectors. Baculovirus vectors available for expression of proteins in cultured insect cells (e.g., SF9 cells) include the pAc series (Smith, et al., 1983. Mol. Cell. Biol. 3: 2156-2165) and the pVL series (Lucklow and Summers, 1989. Virology 170: 31-39).

[0887] In some embodiments, a vector is capable of driving expression of one or more sequences in mammalian cells using a mammalian expression vector. Examples of mammalian expression vectors include pCDM8 (Seed, 1987. Nature 329: 840) and pMT2PC (Kaufman, et al., 1987. EMBO J. 6: 187-195). When used in mammalian cells, the expression vector's control functions are typically provided by one or more regulatory elements. For example, commonly used promoters are derived from polyoma, adenovirus 2, cytomegalovirus, simian virus 40, and others disclosed herein and known in the art. For other suitable expression systems for both prokaryotic and eukaryotic cells see, e.g., Chapters 16 and 17 of Sambrook, et al., MOLECULAR CLONING: A LABORATORY MANUAL. 2nd ed., Cold Spring Harbor Laboratory, Cold Spring Harbor Laboratory Press, Cold Spring Harbor, N.Y., 1989.

[0888] In some embodiments, the recombinant mammalian expression vector is capable of directing expression of the nucleic acid preferentially in a particular cell type (e.g., tissue-specific regulatory elements are used to express the nucleic acid). Tissue-specific regulatory elements are known in the art. Non-limiting examples of suitable tissue-specific promoters include the albumin promoter (liver-specific; Pinkert, et al., 1987. Genes Dev. 1: 268-277), lymphoid-specific promoters (Calame and Eaton, 1988. Adv. Immunol. 43: 235-275), in particular promoters of T cell receptors (Winoto and Baltimore, 1989. EMBO J. 8: 729-733) and immunoglobulins (Baneiji, et al., 1983. Cell 33: 729-740; Queen and Baltimore, 1983. Cell 33: 741-748), neuron-specific promoters (e.g., the neurofilament promoter; Byrne and Ruddle, 1989. Proc. Natl. Acad. Sci. USA 86: 5473-5477), pancreas-specific promoters (Edlund, et al., 1985. Science 230: 912-916), and mammary gland-specific promoters (e.g., milk whey promoter; U.S. Pat. No. 4,873,316 and European Application Publication No. 264,166). Developmentally-regulated promoters are also encompassed, e.g., the murine hox promoters (Kessel and Gruss, 1990. Science 249: 374-379) and the α-fetoprotein promoter (Campes and Tilghman, 1989. Genes Dev. 3: 537-546). With regards to these prokaryotic and eukaryotic vectors, mention is made of U.S. Pat. No. 6,750,059, the contents of which are incorporated by reference herein in their entirety. Other embodiments of the invention may relate to the use of viral vectors, with regards to which mention is made of U.S. patent application Ser. No. 13/092,085, the contents of which are incorporated by reference herein in their entirety. Tissue-specific regulatory elements are known in the art and in this regard, mention is made of U.S. Pat. No. 7,776,321, the contents of which are incorporated by reference herein in their entirety.

[0889] In some embodiments, a regulatory element is operably linked to one or more elements of a CRISPR system so as to drive expression of the one or more elements of the CRISPR system. In general, CRISPRs (Clustered Regularly Interspaced Short Palindromic Repeats), also known as SPIDRs (SPacer Interspersed Direct Repeats), constitute a family of DNA loci that are usually specific to a particular bacterial species. The CRISPR locus comprises a distinct class of interspersed short sequence repeats (SSRs) that were recognized in E. coli (Ishino et al., J. Bacteriol., 169:5429-5433 [1987]; and Nakata et al., J. Bacteriol., 171:3553-3556 [1989]), and associated genes. Similar interspersed SSRs have been identified in Haloferax mediterranei, Streptococcus pyogenes, Anabaena, and Mycobacterium tuberculosis (See, Groenen et al., Mol. Microbiol., 10:1057-1065 [1993]; Hoe et al., Emerg. Infect. Dis., 5:254-263 [1999]; Masepohl et al., Biochim. Biophys. Acta 1307:26-30 [1996]; and Mojica et al., Mol. Microbiol., 17:85-93 [1995]). The CRISPR loci typically differ from other SSRs by the structure of the repeats, which have been termed short regularly spaced repeats (SRSRs) (Janssen et al., OMICS J. Integ. Biol., 6:23-33 [2002]; and Mojica et al., Mol. Microbiol., 36:244-246 [2000]). In general, the repeats are short elements that occur in clusters that are regularly spaced by unique intervening sequences with a substantially constant length (Mojica et al., [2000], supra). Although the repeat sequences are highly conserved between strains, the number of interspersed repeats and the sequences of the spacer regions typically differ from strain to strain (van Embden et al., J. Bacteriol., 182:2393-2401 [2000]). CRISPR loci have been identified in more than 40 prokaryotes (See e.g., Jansen et al., Mol. Microbiol., 43:1565-1575 [2002]; and Mojica et al., [2005]) including, but not limited to Aeropyrum, Pyrobaculum, Sulfolobus, Archaeoglobus, Halocarcula, Methanobacterium, Methanococcus, Methanosarcina, Methanopyrus, Pyrococcus, Picrophilus, Thermoplasma, Corynebacterium, Mycobacterium, Streptomyces, Aquifex, Porphyromonas, Chlorobium, Thermus, Bacillus, Listeria, Staphylococcus, Clostridium, Thermoanaerobacter, Mycoplasma, Fusobacterium, Azarcus, Chromobacterium, Neisseria, Nitrosomonas, Desulfovibrio, Geobacter, Myxococcus, Campylobacter, Wolinella, Acinetobacter, Envinia, Escherichia, Legionella, Methylococcus, Pasteurella, Photobacterium, Salmonella, Xanthomonas, Yersinia, Treponema, and Thermotoga.

[0890] In general, “nucleic acid-targeting system” as used in the present application refers collectively to transcripts and other elements involved in the expression of or directing the activity of nucleic acid-targeting CRISPR-associated (“Cas”) genes (also referred to herein as an effector protein), including sequences encoding a nucleic acid-targeting Cas (effector) protein and a guide RNA (comprising crRNA sequence and a trans-activating CRISPR/Cas system RNA (tracrRNA) sequence), or other sequences and transcripts from a nucleic acid-targeting CRISPR locus. In some embodiments, one or more elements of a nucleic acid-targeting system are derived from a Type V/Type VI nucleic acid-targeting CRISPR system. In some embodiments, one or more elements of a nucleic acid-targeting system is derived from a particular organism comprising an endogenous nucleic acid-targeting CRISPR system. In general, a nucleic acid-targeting system is characterized by elements that promote the formation of a nucleic acid-targeting complex at the site of a target sequence. In the context of formation of a nucleic acid-targeting complex, “target sequence” refers to a sequence to which a guide sequence is designed to have complementarity, where hybridization between a target sequence and a guide RNA promotes the formation of a DNA or RNA-targeting complex. Full complementarity is not necessarily required, provided there is sufficient complementarity to cause hybridization and promote formation of a nucleic acid-targeting complex. A target sequence may comprise RNA polynucleotides. In some embodiments, a target sequence is located in the nucleus or cytoplasm of a cell. In some embodiments, the target sequence may be within an organelle of a eukaryotic cell, for example, mitochondrion or chloroplast. A sequence or template that may be used for recombination into the targeted locus comprising the target sequences is referred to as an “editing template” or “editing RNA” or “editing sequence”. In aspects of the invention, an exogenous template RNA may be referred to as an editing template. In an aspect of the invention the recombination is homologous recombination.

[0891] Typically, in the context of an endogenous nucleic acid-targeting system, formation of a nucleic acid-targeting complex (comprising a guide RNA hybridized to a target sequence and complexed with one or more nucleic acid-targeting effector proteins) results in cleavage of one or both RNA strands in or near (e.g. within 1, 2, 3, 4, 5, 6, 7, 8, 9, 10, 20, 50, or more base pairs from) the target sequence. In some embodiments, one or more vectors driving expression of one or more elements of a nucleic acid-targeting system are introduced into a host cell such that expression of the elements of the nucleic acid-targeting system direct formation of a nucleic acid-targeting complex at one or more target sites. For example, a nucleic acid-targeting effector protein and a guide RNA could each be operably linked to separate regulatory elements on separate vectors. Alternatively, two or more of the elements expressed from the same or different regulatory elements, may be combined in a single vector, with one or more additional vectors providing any components of the nucleic acid-targeting system not included in the first vector. nucleic acid-targeting system elements that are combined in a single vector may be arranged in any suitable orientation, such as one element located 5′ with respect to (“upstream” of) or 3′ with respect to (“downstream” of) a second element. The coding sequence of one element may be located on the same or opposite strand of the coding sequence of a second element, and oriented in the same or opposite direction. In some embodiments, a single promoter drives expression of a transcript encoding a nucleic acid-targeting effector protein and a guide RNA embedded within one or more intron sequences (e.g. each in a different intron, two or more in at least one intron, or all in a single intron). In some embodiments, the nucleic acid-targeting effector protein and guide RNA are operably linked to and expressed from the same promoter.

[0892] In general, a guide sequence is any polynucleotide sequence having sufficient complementarity with a target polynucleotide sequence to hybridize with the target sequence and direct sequence-specific binding of a nucleic acid-targeting complex to the target sequence. In some embodiments, the degree of complementarity between a guide sequence and its corresponding target sequence, when optimally aligned using a suitable alignment algorithm, is about or more than about 50%, 60%, 75%, 80%, 85%, 90%, 95%, 97.5%, 99%, or more. Optimal alignment may be determined with the use of any suitable algorithm for aligning sequences, non-limiting example of which include the Smith-Waterman algorithm, the Needleman-Wunsch algorithm, algorithms based on the Burrows-Wheeler Transform (e.g. the Burrows Wheeler Aligner), ClustalW, Clustal X, BLAT, Novoalign (Novocraft Technologies, ELAND (Illumina, San Diego, Calif.), SOAP (available at soap.genomics.org.cn), and Maq (available at maq.sourceforge.net). In some embodiments, a guide sequence is about or more than about 5, 10, 11, 12, 13, 14, 15, 16, 17, 18, 19, 20, 21, 22, 23, 24, 25, 26, 27, 28, 29, 30, 35, 40, 45, 50, 75, or more nucleotides in length. In some embodiments, a guide sequence is less than about 75, 50, 45, 40, 35, 30, 25, 20, 15, 12, or fewer nucleotides in length. The ability of a guide sequence to direct sequence-specific binding of a nucleic acid-targeting complex to a target sequence may be assessed by any suitable assay. For example, the components of a nucleic acid-targeting system sufficient to form a nucleic acid-targeting complex, including the guide sequence to be tested, may be provided to a host cell having the corresponding target sequence, such as by transfection with vectors encoding the components of the nucleic acid-targeting CRISPR sequence, followed by an assessment of preferential cleavage within or in the vicinity of the target sequence, such as by Surveyor assay as described herein. Similarly, cleavage of a target polynucleotide sequence (or a sequence in the vicinity thereof) may be evaluated in a test tube by providing the target sequence, components of a nucleic acid-targeting complex, including the guide sequence to be tested and a control guide sequence different from the test guide sequence, and comparing binding or rate of cleavage at or in the vicinity of the target sequence between the test and control guide sequence reactions. Other assays are possible, and will occur to those skilled in the art.

[0893] A guide sequence may be selected to target any target sequence. In some embodiments, the target sequence is a sequence within a gene transcript or mRNA.

[0894] In some embodiments, the target sequence is a sequence within a genome of a cell.

[0895] In some embodiments, a guide sequence is selected to reduce the degree of secondary structure within the guide sequence. Secondary structure may be determined by any suitable polynucleotide folding algorithm. Some programs are based on calculating the minimal Gibbs free energy. An example of one such algorithm is mFold, as described by Zuker and Stiegler (Nucleic Acids Res. 9 (1981), 133-148). Another example folding algorithm is the online webserver RNAfold, developed at Institute for Theoretical Chemistry at the University of Vienna, using the centroid structure prediction algorithm (see e.g. A. R. Gruber et al., 2008, Cell 106(1): 23-24; and P A Carr and G M Church, 2009, Nature Biotechnology 27(12): 1151-62). Further algorithms may be found in U.S. application Serial No. TBA (attorney docket 44790.11.2022; Broad Reference BI-2013/004A); incorporated herein by reference.

[0896] In some embodiments, the nucleic acid-targeting effector protein is part of a fusion protein comprising one or more heterologous protein domains (e.g., about or more than about 1, 2, 3, 4, 5, 6, 7, 8, 9, 10, or more domains in addition to the nucleic acid-targeting effector protein). In some embodiments, the CRISPR effector protein/enzyme is part of a fusion protein comprising one or more heterologous protein domains (e.g. about or more than about 1, 2, 3, 4, 5, 6, 7, 8, 9, 10, or more domains in addition to the CRISPR enzyme). A CRISPR effector protein/enzyme fusion protein may comprise any additional protein sequence, and optionally a linker sequence between any two domains. Examples of protein domains that may be fused to an effector protein include, without limitation, epitope tags, reporter gene sequences, and protein domains having one or more of the following activities: methylase activity, demethylase activity, transcription activation activity, transcription repression activity, transcription release factor activity, hi stone modification activity, RNA cleavage activity and nucleic acid binding activity. Non-limiting examples of epitope tags include histidine (His) tags, V5 tags, FLAG tags, influenza hemagglutinin (HA) tags, Myc tags, VSV-G tags, and thioredoxin (Trx) tags. Examples of reporter genes include, but are not limited to, glutathione-S-transferase (GST), horseradish peroxidase (HRP), chloramphenicol acetyltransferase (CAT) beta-galactosidase, beta-glucuronidase, luciferase, green fluorescent protein (GFP), HcRed, DsRed, cyan fluorescent protein (CFP), yellow fluorescent protein (YFP), and autofluorescent proteins including blue fluorescent protein (BFP). A nucleic acid-targeting effector protein may be fused to a gene sequence encoding a protein or a fragment of a protein that bind DNA molecules or bind other cellular molecules, including but not limited to maltose binding protein (MBP), S-tag, Lex A DNA binding domain (DBD) fusions, GAL4 DNA binding domain fusions, and herpes simplex virus (HSV) BP16 protein fusions. Additional domains that may form part of a fusion protein comprising a nucleic acid-targeting effector protein are described in US20110059502, incorporated herein by reference. In some embodiments, a tagged nucleic acid-targeting effector protein is used to identify the location of a target sequence.

[0897] In some embodiments, a CRISPR enzyme may form a component of an inducible system. The inducible nature of the system would allow for spatiotemporal control of gene editing or gene expression using a form of energy. The form of energy may include but is not limited to electromagnetic radiation, sound energy, chemical energy and thermal energy. Examples of inducible system include tetracycline inducible promoters (Tet-On or Tet-Off), small molecule two-hybrid transcription activations systems (FKBP, ABA, etc), or light inducible systems (Phytochrome, LOV domains, or cryptochrome). In one embodiment, the CRISPR enzyme may be a part of a Light Inducible Transcriptional Effector (LITE) to direct changes in transcriptional activity in a sequence-specific manner. The components of a light may include a CRISPR enzyme, a light-responsive cytochrome heterodimer (e.g. from Arabidopsis thaliana), and a transcriptional activation/repression domain. Further examples of inducible DNA binding proteins and methods for their use are provided in U.S. 61/736,465 and U.S. 61/721,283 and WO 2014/018423 and U.S. Pat. Nos. 8,889,418, 8,895,308, US20140186919, US20140242700, US20140273234, US20140335620, WO2014093635, which is hereby incorporated by reference in its entirety.

[0898] In some aspects, the invention provides methods comprising delivering one or more polynucleotides, such as or one or more vectors as described herein, one or more transcripts thereof, and/or one or proteins transcribed therefrom, to a host cell. In some aspects, the invention further provides cells produced by such methods, and organisms (such as animals, plants, or fungi) comprising or produced from such cells. In some embodiments, a nucleic acid-targeting effector protein in combination with (and optionally complexed with) a guide RNA is delivered to a cell. Conventional viral and non-viral based gene transfer methods can be used to introduce nucleic acids in mammalian cells or target tissues. Such methods can be used to administer nucleic acids encoding components of a nucleic acid-targeting system to cells in culture, or in a host organism. Non-viral vector delivery systems include DNA plasmids, RNA (e.g. a transcript of a vector described herein), naked nucleic acid, and nucleic acid complexed with a delivery vehicle, such as a liposome. Viral vector delivery systems include DNA and RNA viruses, which have either episomal or integrated genomes after delivery to the cell. For a review of gene therapy procedures, see Anderson, Science 256:808-813 (1992); Nabel & Felgner, TIBTECH 11:211-217 (1993); Mitani & Caskey, TIBTECH 11:162-166 (1993); Dillon, TIBTECH 11:167-175 (1993); Miller, Nature 357:455-460 (1992); Van Brunt, Biotechnology 6(10):1149-1154 (1988); Vigne, Restorative Neurology and Neuroscience 8:35-36 (1995); Kremer & Perricaudet, British Medical Bulletin 51(1):31-44 (1995); Haddada et al., in Current Topics in Microbiology and Immunology, Doerfler and Böhm (eds) (1995); and Yu et al., Gene Therapy 1:13-26 (1994).

[0899] Methods of non-viral delivery of nucleic acids include lipofection, nucleofection, microinjection, biolistics, virosomes, liposomes, immunoliposomes, polycation or lipid:nucleic acid conjugates, naked DNA, artificial virions, and agent-enhanced uptake of DNA. Lipofection is described in e.g., U.S. Pat. Nos. 5,049,386, 4,946,787; and 4,897,355) and lipofection reagents are sold commercially (e.g., Transfectam™ and Lipofectin™). Cationic and neutral lipids that are suitable for efficient receptor-recognition lipofection of polynucleotides include those of Felgner, WO 91/17424; WO 91/16024. Delivery can be to cells (e.g. in vitro or ex vivo administration) or target tissues (e.g. in vivo administration).

[0900] The preparation of lipid:nucleic acid complexes, including targeted liposomes such as immunolipid complexes, is well known to one of skill in the art (see, e.g., Crystal, Science 270:404-410 (1995); Blaese et al., Cancer Gene Ther. 2:291-297 (1995); Behr et al., Bioconjugate Chem. 5:382-389 (1994); Remy et al., Bioconjugate Chem. 5:647-654 (1994); Gao et al., Gene Therapy 2:710-722 (1995); Ahmad et al., Cancer Res. 52:4817-4820 (1992); U.S. Pat. Nos. 4,186,183, 4,217,344, 4,235,871, 4,261,975, 4,485,054, 4,501,728, 4,774,085, 4,837,028, and 4,946,787).

[0901] The use of RNA or DNA viral based systems for the delivery of nucleic acids takes advantage of highly evolved processes for targeting a virus to specific cells in the body and trafficking the viral payload to the nucleus. Viral vectors can be administered directly to patients (in vivo) or they can be used to treat cells in vitro, and the modified cells may optionally be administered to patients (ex vivo). Conventional viral based systems could include retroviral, lentivirus, adenoviral, adeno-associated and herpes simplex virus vectors for gene transfer. Integration in the host genome is possible with the retrovirus, lentivirus, and adeno-associated virus gene transfer methods, often resulting in long term expression of the inserted transgene. Additionally, high transduction efficiencies have been observed in many different cell types and target tissues.

[0902] The tropism of a retrovirus can be altered by incorporating foreign envelope proteins, expanding the potential target population of target cells. Lentiviral vectors are retroviral vectors that are able to transduce or infect non-dividing cells and typically produce high viral titers. Selection of a retroviral gene transfer system would therefore depend on the target tissue. Retroviral vectors are comprised of cis-acting long terminal repeats with packaging capacity for up to 6-10 kb of foreign sequence. The minimum cis-acting LTRs are sufficient for replication and packaging of the vectors, which are then used to integrate the therapeutic gene into the target cell to provide permanent transgene expression. Widely used retroviral vectors include those based upon murine leukemia virus (MuLV), gibbon ape leukemia virus (GaLV), Simian Immuno deficiency virus (SIV), human immuno deficiency virus (HIV), and combinations thereof (see, e.g., Buchscher et al., J. Virol. 66:2731-2739 (1992); Johann et al., J. Virol. 66:1635-1640 (1992); Sommnerfelt et al., Virol. 176:58-59 (1990); Wilson et al., J. Virol. 63:2374-2378 (1989); Miller et al., J. Virol. 65:2220-2224 (1991); PCT/US94/05700). In applications where transient expression is preferred, adenoviral based systems may be used. Adenoviral based vectors are capable of very high transduction efficiency in many cell types and do not require cell division. With such vectors, high titer and levels of expression have been obtained. This vector can be produced in large quantities in a relatively simple system. Adeno-associated virus (“AAV”) vectors may also be used to transduce cells with target nucleic acids, e.g., in the in vitro production of nucleic acids and peptides, and for in vivo and ex vivo gene therapy procedures (see, e.g., West et al., Virology 160:38-47 (1987); U.S. Pat. No. 4,797,368; WO 93/24641; Kotin, Human Gene Therapy 5:793-801 (1994); Muzyczka, J. Clin. Invest. 94:1351 (1994). Construction of recombinant AAV vectors are described in a number of publications, including U.S. Pat. No. 5,173,414; Tratschin et al., Mol. Cell. Biol. 5:3251-3260 (1985); Tratschin, et al., Mol. Cell. Biol. 4:2072-2081 (1984); Hermonat & Muzyczka, PNAS 81:6466-6470 (1984); and Samulski et al., J. Virol. 63:03822-3828 (1989).

### Models of Genetic and Epigenetic Conditions

[0903] A method of the invention may be used to create a plant, an animal or cell that may be used to model and/or study genetic or epigenetic conditions of interest, such as a through a model of mutations of interest or a disease model. As used herein, “disease” refers to a disease, disorder, or indication in a subject. For example, a method of the invention may be used to create an animal or cell that comprises a modification in one or more nucleic acid sequences associated with a disease, or a plant, animal or cell in which the expression of one or more nucleic acid sequences associated with a disease are altered. Such a nucleic acid sequence may encode a disease associated protein sequence or may be a disease associated control sequence. Accordingly, it is understood that in embodiments of the invention, a plant, subject, patient, organism or cell can be a non-human subject, patient, organism or cell. Thus, the invention provides a plant, animal or cell, produced by the present methods, or a progeny thereof. The progeny may be a clone of the produced plant or animal, or may result from sexual reproduction by crossing with other individuals of the same species to introgress further desirable traits into their offspring. The cell may be in vivo or ex vivo in the cases of multicellular organisms, particularly animals or plants. In the instance where the cell is in cultured, a cell line may be established if appropriate culturing conditions are met and preferably if the cell is suitably adapted for this purpose (for instance a stem cell). Bacterial cell lines produced by the invention are also envisaged. Hence, cell lines are also envisaged.

[0904] In some methods, the disease model can be used to study the effects of mutations on the animal or cell and development and/or progression of the disease using measures commonly used in the study of the disease. Alternatively, such a disease model is useful for studying the effect of a pharmaceutically active compound on the disease.

[0905] In some methods, the disease model can be used to assess the efficacy of a potential gene therapy strategy. That is, a disease-associated gene or polynucleotide can be modified such that the disease development and/or progression is inhibited or reduced. In particular, the method comprises modifying a disease-associated gene or polynucleotide such that an altered protein is produced and, as a result, the animal or cell has an altered response. Accordingly, in some methods, a genetically modified animal may be compared with an animal predisposed to development of the disease such that the effect of the gene therapy event may be assessed.

[0906] In another embodiment, this invention provides a method of developing a biologically active agent that modulates a cell signaling event associated with a disease gene. The method comprises contacting a test compound with a cell comprising one or more vectors that drive expression of one or more of a CRISPR enzyme, and a direct repeat sequence linked to a guide sequence; and detecting a change in a readout that is indicative of a reduction or an augmentation of a cell signaling event associated with, e.g., a mutation in a disease gene contained in the cell.

[0907] A cell model or animal model can be constructed in combination with the method of the invention for screening a cellular function change. Such a model may be used to study the effects of a genome sequence modified by the CRISPR complex of the invention on a cellular function of interest. For example, a cellular function model may be used to study the effect of a modified genome sequence on intracellular signaling or extracellular signaling. Alternatively, a cellular function model may be used to study the effects of a modified genome sequence on sensory perception. In some such models, one or more genome sequences associated with a signaling biochemical pathway in the model are modified.

[0908] Several disease models have been specifically investigated. These include de novo autism risk genes CHD8, KATNAL2, and SCN2A; and the syndromic autism (Angelman Syndrome) gene UBE3A. These genes and resulting autism models are of course preferred, but serve to show the broad applicability of the invention across genes and corresponding models.

[0909] An altered expression of one or more genome sequences associated with a signalling biochemical pathway can be determined by assaying for a difference in the mRNA levels of the corresponding genes between the test model cell and a control cell, when they are contacted with a candidate agent. Alternatively, the differential expression of the sequences associated with a signaling biochemical pathway is determined by detecting a difference in the level of the encoded polypeptide or gene product.

[0910] To assay for an agent-induced alteration in the level of mRNA transcripts or corresponding polynucleotides, nucleic acid contained in a sample is first extracted according to standard methods in the art. For instance, mRNA can be isolated using various lytic enzymes or chemical solutions according to the procedures set forth in Sambrook et al. (1989), or extracted by nucleic-acid-binding resins following the accompanying instructions provided by the manufacturers. The mRNA contained in the extracted nucleic acid sample is then detected by amplification procedures or conventional hybridization assays (e.g. Northern blot analysis) according to methods widely known in the art or based on the methods exemplified herein.

[0911] For purpose of this invention, amplification means any method employing a primer and a polymerase capable of replicating a target sequence with reasonable fidelity. Amplification may be carried out by natural or recombinant DNA polymerases such as TaqGold™, T7 DNA polymerase, Klenow fragment of E. coli DNA polymerase, and reverse transcriptase. A preferred amplification method is PCR. In particular, the isolated RNA can be subjected to a reverse transcription assay that is coupled with a quantitative polymerase chain reaction (RT-PCR) in order to quantify the expression level of a sequence associated with a signaling biochemical pathway.

[0912] Detection of the gene expression level can be conducted in real time in an amplification assay. In one aspect, the amplified products can be directly visualized with fluorescent DNA-binding agents including but not limited to DNA intercalators and DNA groove binders. Because the amount of the intercalators incorporated into the double-stranded DNA molecules is typically proportional to the amount of the amplified DNA products, one can conveniently determine the amount of the amplified products by quantifying the fluorescence of the intercalated dye using conventional optical systems in the art. DNA-binding dye suitable for this application include SYBR green, SYBR blue, DAPI, propidium iodine, Hoeste, SYBR gold, ethidium bromide, acridines, proflavine, acridine orange, acriflavine, fluorcoumanin, ellipticine, daunomycin, chloroquine, distamycin D, chromomycin, homidium, mithramycin, ruthenium polypyridyls, anthramycin, and the like.

[0913] In another aspect, other fluorescent labels such as sequence specific probes can be employed in the amplification reaction to facilitate the detection and quantification of the amplified products. Probe-based quantitative amplification relies on the sequence-specific detection of a desired amplified product. It utilizes fluorescent, target-specific probes (e.g., TaqMan® probes) resulting in increased specificity and sensitivity. Methods for performing probe-based quantitative amplification are well established in the art and are taught in U.S. Pat. No. 5,210,015.

[0914] In yet another aspect, conventional hybridization assays using hybridization probes that share sequence homology with sequences associated with a signaling biochemical pathway can be performed. Typically, probes are allowed to form stable complexes with the sequences associated with a signaling biochemical pathway contained within the biological sample derived from the test subject in a hybridization reaction. It will be appreciated by one of skill in the art that where antisense is used as the probe nucleic acid, the target polynucleotides provided in the sample are chosen to be complementary to sequences of the antisense nucleic acids. Conversely, where the nucleotide probe is a sense nucleic acid, the target polynucleotide is selected to be complementary to sequences of the sense nucleic acid.

[0915] Hybridization can be performed under conditions of various stringency. Suitable hybridization conditions for the practice of the present invention are such that the recognition interaction between the probe and sequences associated with a signaling biochemical pathway is both sufficiently specific and sufficiently stable. Conditions that increase the stringency of a hybridization reaction are widely known and published in the art. See, for example, (Sambrook, et al., (1989); Nonradioactive In Situ Hybridization Application Manual, Boehringer Mannheim, second edition). The hybridization assay can be formed using probes immobilized on any solid support, including but are not limited to nitrocellulose, glass, silicon, and a variety of gene arrays. A preferred hybridization assay is conducted on high-density gene chips as described in U.S. Pat. No. 5,445,934.

[0916] For a convenient detection of the probe-target complexes formed during the hybridization assay, the nucleotide probes are conjugated to a detectable label. Detectable labels suitable for use in the present invention include any composition detectable by photochemical, biochemical, spectroscopic, immunochemical, electrical, optical or chemical means. A wide variety of appropriate detectable labels are known in the art, which include fluorescent or chemiluminescent labels, radioactive isotope labels, enzymatic or other ligands. In preferred embodiments, one will likely desire to employ a fluorescent label or an enzyme tag, such as digoxigenin, ß-galactosidase, urease, alkaline phosphatase or peroxidase, avidin/biotin complex.

[0917] The detection methods used to detect or quantify the hybridization intensity will typically depend upon the label selected above. For example, radiolabels may be detected using photographic film or a phosphoimager. Fluorescent markers may be detected and quantified using a photodetector to detect emitted light. Enzymatic labels are typically detected by providing the enzyme with a substrate and measuring the reaction product produced by the action of the enzyme on the substrate; and finally colorimetric labels are detected by simply visualizing the colored label.

[0918] An agent-induced change in expression of sequences associated with a signaling biochemical pathway can also be determined by examining the corresponding gene products. Determining the protein level typically involves a) contacting the protein contained in a biological sample with an agent that specifically bind to a protein associated with a signaling biochemical pathway; and (b) identifying any agent:protein complex so formed. In one aspect of this embodiment, the agent that specifically binds a protein associated with a signaling biochemical pathway is an antibody, preferably a monoclonal antibody.

[0919] The reaction is performed by contacting the agent with a sample of the proteins associated with a signaling biochemical pathway derived from the test samples under conditions that will allow a complex to form between the agent and the proteins associated with a signaling biochemical pathway. The formation of the complex can be detected directly or indirectly according to standard procedures in the art. In the direct detection method, the agents are supplied with a detectable label and unreacted agents may be removed from the complex; the amount of remaining label thereby indicating the amount of complex formed. For such method, it is preferable to select labels that remain attached to the agents even during stringent washing conditions. It is preferable that the label does not interfere with the binding reaction. In the alternative, an indirect detection procedure may use an agent that contains a label introduced either chemically or enzymatically. A desirable label generally does not interfere with binding or the stability of the resulting agent:polypeptide complex. However, the label is typically designed to be accessible to an antibody for an effective binding and hence generating a detectable signal.

[0920] A wide variety of labels suitable for detecting protein levels are known in the art. Non-limiting examples include radioisotopes, enzymes, colloidal metals, fluorescent compounds, bioluminescent compounds, and chemiluminescent compounds.

[0921] The amount of agent:polypeptide complexes formed during the binding reaction can be quantified by standard quantitative assays. As illustrated above, the formation of agent:polypeptide complex can be measured directly by the amount of label remained at the site of binding. In an alternative, the protein associated with a signaling biochemical pathway is tested for its ability to compete with a labeled analog for binding sites on the specific agent. In this competitive assay, the amount of label captured is inversely proportional to the amount of protein sequences associated with a signaling biochemical pathway present in a test sample.

[0922] A number of techniques for protein analysis based on the general principles outlined above are available in the art. They include but are not limited to radioimmunoassays, ELISA (enzyme linked immunoradiometric assays), “sandwich” immunoassays, immunoradiometric assays, in situ immunoassays (using e.g., colloidal gold, enzyme or radioisotope labels), western blot analysis, immunoprecipitation assays, immunofluorescent assays, and SDS-PAGE.

[0923] Antibodies that specifically recognize or bind to proteins associated with a signaling biochemical pathway are preferable for conducting the aforementioned protein analyses. Where desired, antibodies that recognize a specific type of post-translational modifications (e.g., signaling biochemical pathway inducible modifications) can be used. Post-translational modifications include but are not limited to glycosylation, lipidation, acetylation, and phosphorylation. These antibodies may be purchased from commercial vendors. For example, anti-phosphotyrosine antibodies that specifically recognize tyrosine-phosphorylated proteins are available from a number of vendors including Invitrogen and Perkin Elmer. Antiphosphotyrosine antibodies are particularly useful in detecting proteins that are differentially phosphorylated on their tyrosine residues in response to an ER stress. Such proteins include but are not limited to eukaryotic translation initiation factor 2 alpha (eIF-2a). Alternatively, these antibodies can be generated using conventional polyclonal or monoclonal antibody technologies by immunizing a host animal or an antibody-producing cell with a target protein that exhibits the desired post-translational modification.

[0924] In practicing the subject method, it may be desirable to discern the expression pattern of an protein associated with a signaling biochemical pathway in different bodily tissue, in different cell types, and/or in different subcellular structures. These studies can be performed with the use of tissue-specific, cell-specific or subcellular structure specific antibodies capable of binding to protein markers that are preferentially expressed in certain tissues, cell types, or subcellular structures.

[0925] An altered expression of a gene associated with a signaling biochemical pathway can also be determined by examining a change in activity of the gene product relative to a control cell. The assay for an agent-induced change in the activity of a protein associated with a signaling biochemical pathway will dependent on the biological activity and/or the signal transduction pathway that is under investigation. For example, where the protein is a kinase, a change in its ability to phosphorylate the downstream substrate(s) can be determined by a variety of assays known in the art. Representative assays include but are not limited to immunoblotting and immunoprecipitation with antibodies such as anti-phosphotyrosine antibodies that recognize phosphorylated proteins. In addition, kinase activity can be detected by high throughput chemiluminescent assays such as AlphaScreen™ (available from Perkin Elmer) and eTag™ assay (Chan-Hui, et al. (2003) Clinical Immunology 111: 162-174).

[0926] Where the protein associated with a signaling biochemical pathway is part of a signaling cascade leading to a fluctuation of intracellular pH condition, pH sensitive molecules such as fluorescent pH dyes can be used as the reporter molecules. In another example where the protein associated with a signaling biochemical pathway is an ion channel, fluctuations in membrane potential and/or intracellular ion concentration can be monitored. A number of commercial kits and high-throughput devices are particularly suited for a rapid and robust screening for modulators of ion channels. Representative instruments include FLIPR™ (Molecular Devices, Inc.) and VIPR (Aurora Biosciences). These instruments are capable of detecting reactions in over 1000 sample wells of a microplate simultaneously, and providing real-time measurement and functional data within a second or even a minisecond.

[0927] In practicing any of the methods disclosed herein, a suitable vector can be introduced to a cell or an embryo via one or more methods known in the art, including without limitation, microinjection, electroporation, sonoporation, biolistics, calcium phosphate-mediated transfection, cationic transfection, liposome transfection, dendrimer transfection, heat shock transfection, nucleofection transfection, magnetofection, lipofection, impalefection, optical transfection, proprietary agent-enhanced uptake of nucleic acids, and delivery via liposomes, immunoliposomes, virosomes, or artificial virions. In some methods, the vector is introduced into an embryo by microinjection. The vector or vectors may be microinjected into the nucleus or the cytoplasm of the embryo. In some methods, the vector or vectors may be introduced into a cell by nucleofection.

[0928] The target polynucleotide of a CRISPR complex can be any polynucleotide endogenous or exogenous to the eukaryotic cell. For example, the target polynucleotide can be a polynucleotide residing in the nucleus of the eukaryotic cell. The target polynucleotide can be a sequence coding a gene product (e.g., a protein) or a non-coding sequence (e.g., a regulatory polynucleotide or a junk DNA).

[0929] Examples of target polynucleotides include a sequence associated with a signaling biochemical pathway, e.g., a signaling biochemical pathway-associated gene or polynucleotide. Examples of target polynucleotides include a disease associated gene or polynucleotide. A “disease-associated” gene or polynucleotide refers to any gene or polynucleotide which is yielding transcription or translation products at an abnormal level or in an abnormal form in cells derived from a disease-affected tissues compared with tissues or cells of a non disease control. It may be a gene that becomes expressed at an abnormally high level; it may be a gene that becomes expressed at an abnormally low level, where the altered expression correlates with the occurrence and/or progression of the disease. A disease-associated gene also refers to a gene possessing mutation(s) or genetic variation that is directly responsible or is in linkage disequilibrium with a gene(s) that is responsible for the etiology of a disease. The transcribed or translated products may be known or unknown, and may be at a normal or abnormal level.

[0930] The target polynucleotide of a CRISPR complex can be any polynucleotide endogenous or exogenous to the eukaryotic cell. For example, the target polynucleotide can be a polynucleotide residing in the nucleus of the eukaryotic cell. The target polynucleotide can be a sequence coding a gene product (e.g., a protein) or a non-coding sequence (e.g., a regulatory polynucleotide or a junk DNA). Without wishing to be bound by theory, it is believed that the target sequence should be associated with a PAM (protospacer adjacent motif); that is, a short sequence recognized by the CRISPR complex. The precise sequence and length requirements for the PAM differ depending on the CRISPR enzyme used, but PAMs are typically 2-5 base pair sequences adjacent the protospacer (that is, the target sequence) Examples of PAM sequences are given in the examples section below, and the skilled person will be able to identify further PAM sequences for use with a given CRISPR enzyme.

[0931] The target polynucleotide of a CRISPR complex may include a number of disease associated genes and polynucleotides as well as signaling biochemical pathway-associated genes and polynucleotides as listed in U.S. provisional patent applications 61/736,527 and 61/748,427 both entitled SYSTEMS METHODS AND COMPOSITIONS FOR SEQUENCE MANIPULATION filed on Dec. 12, 2012 and Jan. 2, 2013, respectively, and PCT Application PCT/US2013/074667, entitled DELIVERY, ENGINEERING AND OPTIMIZATION OF SYSTEMS, METHODS AND COMPOSITIONS FOR SEQUENCE MANIPULATION AND THERAPEUTIC APPLICATIONS, filed Dec. 12, 2013, the contents of all of which are herein incorporated by reference in their entirety.

[0932] Examples of target polynucleotides include a sequence associated with a signaling biochemical pathway, e.g., a signaling biochemical pathway-associated gene or polynucleotide. Examples of target polynucleotides include a disease associated gene or polynucleotide. A “disease-associated” gene or polynucleotide refers to any gene or polynucleotide which is yielding transcription or translation products at an abnormal level or in an abnormal form in cells derived from a disease-affected tissues compared with tissues or cells of a non-disease control. It may be a gene that becomes expressed at an abnormally high level; it may be a gene that becomes expressed at an abnormally low level, where the altered expression correlates with the occurrence and/or progression of the disease. A disease-associated gene also refers to a gene possessing mutation(s) or genetic variation that is directly responsible or is in linkage disequilibrium with a gene(s) that is responsible for the etiology of a disease. The transcribed or translated products may be known or unknown, and may be at a normal or abnormal level.

### Transcriptome Wide Knock-down Screening

[0933] The CRISPR effector protein complexes described herein can be used to perform efficient and cost effective functional transcriptonic screens. Such screens can utilize CRISPR effector protein based transcriptome wide libraries. Such screens and libraries can provide for determining the function of genes, cellular pathways genes are involved in, and how any alteration in gene expression can result in a particular biological process. An advantage of the present invention is that the CRISPR system avoids off-target binding and its resulting side effects. This is achieved using systems arranged to have a high degree of sequence specificity for the target DNA. In preferred embodiments of the invention, the CRISPR effector protein complexes are Cas13c effector protein complexes.

[0934] In embodiments of the invention, a transcriptome wide library may comprise a plurality of Cas13c guide RNAs, as described herein, comprising guide sequences that are capable of targeting a plurality of target sequences in a plurality of loci in a population of eukaryotic cells. The population of cells may be a population of embryonic stem (ES) cells. The target sequence in the locus may be a non-coding sequence. The non-coding sequence may be an intron, regulatory sequence, splice site, 3′ UTR, 5′ UTR, or polyadenylation signal. Gene function of one or more gene products may be altered by said targeting. The targeting may result in a knockout of gene function. The targeting of a gene product may comprise more than one guide RNA. A gene product may be targeted by 2, 3, 4, 5, 6, 7, 8, 9, or 10 guide RNAs, preferably 3 to 4 per gene. Off-target modifications may be minimized by exploiting the staggered double strand breaks generated by Cas13c effector protein complexes or by utilizing methods analogous to those used in CRISPR-Cas9 systems (See, e.g., DNA targeting specificity of RNA-guided Cas9 nucleases. Hsu, P., Scott, D., Weinstein, J., Ran, F A., Konermann, S., Agarwala, V., Li, Y., Fine, E., Wu, X., Shalem, O., Cradick, T J., Marraffini, L A., Bao, Zhang, F. Nat Biotechnol doi:10.1038/nbt.2647 (2013)), incorporated herein by reference. The targeting may be of about 100 or more sequences. The targeting may be of about 1000 or more sequences. The targeting may be of about 20,000 or more sequences. The targeting may be of the entire genome. The targeting may be of a panel of target sequences focused on a relevant or desirable pathway. The pathway may be an immune pathway. The pathway may be a cell division pathway.

[0935] One aspect of the invention comprehends a transcriptome wide library that may comprise a plurality of Cas13c guide RNAs that may comprise guide sequences that are capable of targeting a plurality of target sequences in a plurality of loci, wherein said targeting results in a knockdown of gene function. This library may potentially comprise guide RNAs that target each and every gene in the genome of an organism.

[0936] In some embodiments of the invention the organism or subject is a eukaryote (including mammal including human) or a non-human eukaryote or a non-human animal or a non-human mammal. In some embodiments, the organism or subject is a non-human animal, and may be an arthropod, for example, an insect, or may be a nematode. In some methods of the invention the organism or subject is a plant. In some methods of the invention the organism or subject is a mammal or a non-human mammal. A non-human mammal may be for example a rodent (preferably a mouse or a rat), an ungulate, or a primate. In some methods of the invention the organism or subject is algae, including microalgae, or is a fungus.

[0937] The knockdown of gene function may comprise: introducing into each cell in the population of cells a vector system of one or more vectors comprising an engineered, non-naturally occurring Cas13c effector protein system comprising I. a Cas13c effector protein, and II. one or more guide RNAs, wherein components I and II may be same or on different vectors of the system, integrating components I and II into each cell, wherein the guide sequence targets a unique gene in each cell, wherein the Cas13c effector protein is operably linked to a regulatory element, wherein when transcribed, the guide RNA comprising the guide sequence directs sequence-specific binding of the Cas13c effector protein system to a target sequence in the genomic loci of the unique gene, inducing cleavage of the genomic loci by the Cas13c effector protein, and confirming different knockdown events in a plurality of unique genes in each cell of the population of cells thereby generating a gene knockdown cell library. The invention comprehends that the population of cells is a population of eukaryotic cells, and in a preferred embodiment, the population of cells is a population of embryonic stem (ES) cells.

[0938] The one or more vectors may be plasmid vectors. The vector may be a single vector comprising a Cas13c effector protein, a sgRNA, and optionally, a selection marker into target cells. Not being bound by a theory, the ability to simultaneously deliver a Cas13c effector protein and sgRNA through a single vector enables application to any cell type of interest, without the need to first generate cell lines that express the Cas13c effector protein. The regulatory element may be an inducible promoter. The inducible promoter may be a doxycycline inducible promoter. In some methods of the invention the expression of the guide sequence is under the control of the T7 promoter and is driven by the expression of T7 polymerase. The confirming of different knockdown events may be by whole transcriptome sequencing. The knockdown event may be achieved in 100 or more unique genes. The knockdown event may be achieved in 1000 or more unique genes. The knockdown event may be achieved in 20,000 or more unique genes. The knockdown event may be achieved in the entire transcriptome. The knockdown of gene function may be achieved in a plurality of unique genes which function in a particular physiological pathway or condition. The pathway or condition may be an immune pathway or condition. The pathway or condition may be a cell division pathway or condition.

[0939] The invention also provides kits that comprise the transcriptome wide libraries mentioned herein. The kit may comprise a single container comprising vectors or plasmids comprising the library of the invention. The kit may also comprise a panel comprising a selection of unique Cas13c effector protein system guide RNAs comprising guide sequences from the library of the invention, wherein the selection is indicative of a particular physiological condition. The invention comprehends that the targeting is of about 100 or more sequences, about 1000 or more sequences or about 20,000 or more sequences or the entire transcriptome. Furthermore, a panel of target sequences may be focused on a relevant or desirable pathway, such as an immune pathway or cell division.

[0940] In an additional aspect of the invention, the Cas13c effector protein may comprise one or more mutations and may be used as a generic RNA binding protein with or without fusion to a functional domain. The mutations may be artificially introduced mutations or gain- or loss-of-function mutations. The mutations have been characterized as described herein. In one aspect of the invention, the functional domain may be a transcriptional activation domain, which may be VP64. In other aspects of the invention, the functional domain may be a transcriptional repressor domain, which may be KRAB or SID4X. Other aspects of the invention relate to the mutated Cas13c effector protein being fused to domains which include but are not limited to a transcriptional activator, repressor, a recombinase, a transposase, a histone remodeler, a demethylase, a DNA methyltransferase, a cryptochrome, a light inducible/controllable domain or a chemically inducible/controllable domain. Some methods of the invention can include inducing expression of targeted genes. In one embodiment, inducing expression by targeting a plurality of target sequences in a plurality of genomic loci in a population of eukaryotic cells is by use of a functional domain.

[0941] Useful in the practice of the instant invention utilizing Cas13c 3effector protein complexes are methods used in CRISPR-Cas9 systems and reference is made to:

[0942] Genome-Scale CRISPR-Cas9 Knockout Screening in Human Cells. Shalem, O., Sanjana, N E., Hartenian, E., Shi, X., Scott, D A., Mikkelson, T., Heckl, D., Ebert, B L., Root, D E., Doench, J G., Zhang, F. Science December 12. (2013). [Epub ahead of print]; Published in final edited form as: Science. 2014 Jan. 3; 343(6166): 84-87.

[0943] Shalem et al. involves a new way to interrogate gene function on a genome-wide scale. Their studies showed that delivery of a genome-scale CRISPR-Cas9 knockout (GeCKO) library targeted 18,080 genes with 64,751 unique guide sequences enabled both negative and positive selection screening in human cells. First, the authors showed use of the GeCKO library to identify genes essential for cell viability in cancer and pluripotent stem cells. Next, in a melanoma model, the authors screened for genes whose loss is involved in resistance to vemurafenib, a therapeutic that inhibits mutant protein kinase BRAF. Their studies showed that the highest-ranking candidates included previously validated genes NF1 and MED12 as well as novel hitsNF2, CUL3, TADA2B, and TADA1. The authors observed a high level of consistency between independent guide RNAs targeting the same gene and a high rate of hit confirmation, and thus demonstrated the promise of genome-scale screening with Cas9.

[0944] Reference is also made to US patent publication number US20140357530; and PCT Patent Publication WO2014093701, hereby incorporated herein by reference.

### Functional Alteration and Screening

[0945] In another aspect, the present invention provides for a method of functional evaluation and screening of genes. The use of the CRISPR system of the present invention to precisely deliver functional domains, to activate or repress genes or to alter epigenetic state by precisely altering the methylation site on a specific locus of interest, can be with one or more guide RNAs applied to a single cell or population of cells or with a library applied to genome in a pool of cells ex vivo or in vivo comprising the administration or expression of a library comprising a plurality of guide RNAs (sgRNAs) and wherein the screening further comprises use of a Cas13c effector protein, wherein the CRISPR complex comprising the Cas13c effector protein is modified to comprise a heterologous functional domain. In an aspect the invention provides a method for screening a genome/transcriptome comprising the administration to a host or expression in a host in vivo of a library. In an aspect the invention provides a method as herein discussed further comprising an activator administered to the host or expressed in the host. In an aspect the invention provides a method as herein discussed wherein the activator is attached to a Cas13c effector protein. In an aspect the invention provides a method as herein discussed wherein the activator is attached to the N terminus or the C terminus of the Cas13c effector protein. In an aspect the invention provides a method as herein discussed wherein the activator is attached to a sgRNA loop. In an aspect the invention provides a method as herein discussed further comprising a repressor administered to the host or expressed in the host. In an aspect the invention provides a method as herein discussed, wherein the screening comprises affecting and detecting gene activation, gene inhibition, or cleavage in the locus.

[0946] In an aspect, the invention provides efficient on-target activity and minimizes off target activity. In an aspect, the invention provides efficient on-target cleavage by Cas13c effector protein and minimizes off-target cleavage by the Cas13c effector protein. In an aspect, the invention provides guide specific binding of Cas13c effector protein at a gene locus without DNA cleavage. Accordingly, in an aspect, the invention provides target-specific gene regulation. In an aspect, the invention provides guide specific binding of Cas13c effector protein at a gene locus without DNA cleavage. Accordingly, in an aspect, the invention provides for cleavage at one locus and gene regulation at a different locus using a single Cas13c effector protein. In an aspect, the invention provides orthogonal activation and/or inhibition and/or cleavage of multiple targets using one or more Cas13c effector protein and/or enzyme.

[0947] In an aspect the invention provides a method as herein discussed, wherein the host is a eukaryotic cell. In an aspect the invention provides a method as herein discussed, wherein the host is a mammalian cell. In an aspect the invention provides a method as herein discussed, wherein the host is a non-human eukaryote. In an aspect the invention provides a method as herein discussed, wherein the non-human eukaryote is a non-human mammal. In an aspect the invention provides a method as herein discussed, wherein the non-human mammal is a mouse. An aspect the invention provides a method as herein discussed comprising the delivery of the Cas13c effector protein complexes or component(s) thereof or nucleic acid molecule(s) coding therefor, wherein said nucleic acid molecule(s) are operatively linked to regulatory sequence(s) and expressed in vivo. In an aspect the invention provides a method as herein discussed wherein the expressing in vivo is via a lentivirus, an adenovirus, or an AAV. In an aspect the invention provides a method as herein discussed wherein the delivery is via a particle, a nanoparticle, a lipid or a cell penetrating peptide (CPP).

[0948] In an aspect the invention provides a pair of CRISPR complexes comprising Cas13c effector protein, each comprising a guide RNA (sgRNA) comprising a guide sequence capable of hybridizing to a target sequence in a genomic locus of interest in a cell, wherein at least one loop of each sgRNA is modified by the insertion of distinct RNA sequence(s) that bind to one or more adaptor proteins, and wherein the adaptor protein is associated with one or more functional domains, wherein each sgRNA of each Cas13c effector protein complex comprises a functional domain having a DNA cleavage activity.

[0949] In an aspect the invention provides a method for cutting a target sequence in a locus of interest comprising delivery to a cell of the Cas13c effector protein complexes or component(s) thereof or nucleic acid molecule(s) coding therefor, wherein said nucleic acid molecule(s) are operatively linked to regulatory sequence(s) and expressed in vivo. In an aspect the invention provides a method as herein-discussed wherein the delivery is via a lentivirus, an adenovirus, or an AAV.

[0950] In an aspect the invention provides a library, method or complex as herein-discussed wherein the sgRNA is modified to have at least one non-coding functional loop, e.g., wherein the at least one non-coding functional loop is repressive; for instance, wherein the at least one non-coding functional loop comprises Alu.

[0951] In one aspect, the invention provides a method for altering or modifying expression of a gene product. The said method may comprise introducing into a cell containing and expressing a DNA molecule encoding the gene product an engineered, non-naturally occurring CRISPR system comprising a Cas13c effector protein and guide RNA that targets the RNA molecule, whereby the guide RNA targets the RNA target molecule encoding the gene product and the Cas13c effector protein cleaves the RNA molecule encoding the gene product, whereby expression of the gene product is altered; and, wherein the Cas13c effector protein and the guide RNA do not naturally occur together. The invention comprehends the guide RNA comprising a guide sequence linked to a direct repeat sequence. The invention further comprehends the Cas13c effector protein being codon optimized for expression in a Eukaryotic cell. In a preferred embodiment the Eukaryotic cell is a mammalian cell and in a more preferred embodiment the mammalian cell is a human cell. In a further embodiment of the invention, the expression of the gene product is decreased.

[0952] In some embodiments, one or more functional domains are associated with the Cas13c effector protein. In some embodiments, one or more functional domains are associated with an adaptor protein, for example as used with the modified guides of Konnerman et al. (Nature 517, 583-588, 29 Jan. 2015). In some embodiments, one or more functional domains are associated with an dead sgRNA (dRNA). In some embodiments, a dRNA complex with active Cas13c effector protein directs gene regulation by a functional domain at on gene locus while an sgRNA directs DNA cleavage by the active Cas13c effector protein at another locus, for example as described analogously in CRISPR-Cas9 systems by Dahlman et al., ‘Orthogonal gene control with a catalytically active Cas9 nuclease,’ Nature Biotechnology 33, p. 1159-61 (November, 2015). In some embodiments, dRNAs are selected to maximize selectivity of regulation for a gene locus of interest compared to off-target regulation. In some embodiments, dRNAs are selected to maximize target gene regulation and minimize target cleavage

[0953] For the purposes of the following discussion, reference to a functional domain could be a functional domain associated with the Cas13c effector protein or a functional domain associated with the adaptor protein.

[0954] In some embodiments, the one or more functional domains is an NLS (Nuclear Localization Sequence) or an NES (Nuclear Export Signal). In some embodiments, the one or more functional domains is a transcriptional activation domain comprises VP64, p65, MyoD1, HSF1, RTA, SET7/9 and a histone acetyltransferase. Other references herein to activation (or activator) domains in respect of those associated with the CRISPR enzyme include any known transcriptional activation domain and specifically VP64, p65, MyoD1, HSF1, RTA, SET7/9 or a histone acetyltransferase.

[0955] In some embodiments, the one or more functional domains is a transcriptional repressor domain. In some embodiments, the transcriptional repressor domain is a KRAB domain. In some embodiments, the transcriptional repressor domain is a NuE domain, NcoR domain, SID domain or a SID4X domain.

[0956] In some embodiments, the one or more functional domains have one or more activities comprising translation activation activity, translation repression activity, methylase activity, demethylase activity, transcription activation activity, transcription repression activity, transcription release factor activity, histone modification activity, RNA cleavage activity, DNA cleavage activity, DNA integration activity or nucleic acid binding activity.

[0957] Histone modifying domains are also preferred in some embodiments. Exemplary histone modifying domains are discussed below. Transposase domains, HR (Homologous Recombination) machinery domains, recombinase domains, and/or integrase domains are also preferred as the present functional domains. In some embodiments, DNA integration activity includes HR machinery domains, integrase domains, recombinase domains and/or transposase domains. Histone acetyltransferases are preferred in some embodiments.

[0958] In some embodiments, the DNA cleavage activity is due to a nuclease. In some embodiments, the nuclease comprises a Fok1 nuclease. See, “Dimeric CRISPR RNA-guided Fok1 nucleases for highly specific genome editing”, Shengdar Q. Tsai, Nicolas Wyvekens, Cyd Khayter, Jennifer A. Foden, Vishal Thapar, Deepak Reyon, Mathew J. Goodwin, Martin J. Aryee, J. Keith Joung Nature Biotechnology 32(6): 569-77 (2014), relates to dimeric RNA-guided Fok1 Nucleases that recognize extended sequences and can edit endogenous genes with high efficiencies in human cells.

[0959] In some embodiments, the one or more functional domains is attached to the Cas13c effector protein so that upon binding to the sgRNA and target the functional domain is in a spatial orientation allowing for the functional domain to function in its attributed function.

[0960] In some embodiments, the one or more functional domains is attached to the adaptor protein so that upon binding of the Cas13c effector protein to the sgRNA and target, the functional domain is in a spatial orientation allowing for the functional domain to function in its attributed function.

[0961] In an aspect the invention provides a composition as herein discussed wherein the one or more functional domains is attached to the Cas13c effector protein or adaptor protein via a linker, optionally a GlySer linker, as discussed herein.

[0962] It is also preferred to target endogenous (regulatory) control elements, such as involved in translation, stability, etc. Targeting of known control elements can be used to activate or repress the gene of interest. Targeting of putative control elements on the other hand can be used as a means to verify such elements (by measuring the translation of the gene of interest) or to detect novel control elements. (In addition, targeting of putative control elements can be useful in the context of understanding genetic causes of disease. Many mutations and common SNP variants associated with disease phenotypes are located outside coding regions. Targeting of such regions with either the activation or repression systems described herein can be followed by readout of transcription of either a) a set of putative targets (e.g. a set of genes located in closest proximity to the control element) or b) whole-transcriptome readout by e.g. RNAseq or microarray. This would allow for the identification of likely candidate genes involved in the disease phenotype. Such candidate genes could be useful as novel drug targets.

[0963] Histone acetyltransferase (HAT) inhibitors are mentioned herein. However, an alternative in some embodiments is for the one or more functional domains to comprise an acetyltransferase, preferably a histone acetyltransferase. These are useful in the field of epigenomics, for example in methods of interrogating the epigenome. Methods of interrogating the epigenome may include, for example, targeting epigenomic sequences. Targeting epigenomic sequences may include the guide being directed to an epigenomic target sequence. Epigenomic target sequence may include, in some embodiments, include a promoter, silencer or an enhancer sequence.

[0964] Use of a functional domain linked to a Cas13c effector protein as described herein, preferably a dead-Cas13c effector protein, more preferably a dead-FnCas13c effector protein, to target epigenomic sequences can be used to activate or repress promoters, silencer or enhancers.

[0965] Examples of acetyltransferases are known but may include, in some embodiments, histone acetyltransferases. In some embodiments, the histone acetyltransferase may comprise the catalytic core of the human acetyltransferase p300 (Gerbasch & Reddy, Nature Biotech 6 Apr. 2015).

[0966] In some preferred embodiments, the functional domain is linked to a dead-Cas13c effector protein to target and activate epigenomic sequences such as promoters or enhancers. One or more guides directed to such promoters or enhancers may also be provided to direct the binding of the CRISPR enzyme to such promoters or enhancers.

[0967] In certain embodiments, the RNA targeting effector protein of the invention can be used to interfere with co-transcriptional modifications of DNA/chromatin structure, RNA-directed DNA methylation, or RNA-directed silencing/activation of DNA/chromatin. RNA-directed DNA methylation (RdDM) is an epigenetic process first discovered in plants. During RdDM, double-stranded RNAs (dsRNAs) are processed to 21-24 nucleotide small interfering RNAs (siRNAs) and guide methylation of homologous DNA loci. Besides RNA molecules, a plethora of proteins are involved in the establishment of RdDM, like Argonautes, DNA methyltransferases, chromatin remodelling complexes and the plant-specific PolIV and PolV. All these act in concert to add a methyl-group at the 5′ position of cytosines. Small RNAs can modify the chromatin structure and silence transcription by guiding Argonaute-containing complexes to complementary nascent (non-coding) RNA trancripts. Subsequently the recruitment of chromatin-modifying complexes, including histone and DNA methyltransferases, is mediated. The RNA targeting effector protein of the invention may be used to target such small RNAs and interfere in interactions between these small RNAs and the nascent non-coding transcripts.

[0968] The term “associated with” is used here in relation to the association of the functional domain to the Cas13c effector protein or the adaptor protein. It is used in respect of how one molecule ‘associates’ with respect to another, for example between an adaptor protein and a functional domain, or between the Cas13c effector protein and a functional domain. In the case of such protein-protein interactions, this association may be viewed in terms of recognition in the way an antibody recognizes an epitope. Alternatively, one protein may be associated with another protein via a fusion of the two, for instance one subunit being fused to another subunit. Fusion typically occurs by addition of the amino acid sequence of one to that of the other, for instance via splicing together of the nucleotide sequences that encode each protein or subunit. Alternatively, this may essentially be viewed as binding between two molecules or direct linkage, such as a fusion protein. In any event, the fusion protein may include a linker between the two subunits of interest (i.e. between the enzyme and the functional domain or between the adaptor protein and the functional domain). Thus, in some embodiments, the Cas13c effector protein or adaptor protein is associated with a functional domain by binding thereto. In other embodiments, the Cas13c effector protein or adaptor protein is associated with a functional domain because the two are fused together, optionally via an intermediate linker.

### Saturating Mutagenesis

[0969] The Cas13c effector protein system(s) described herein can be used to perform saturating or deep scanning mutagenesis of genomic loci in conjunction with a cellular phenotype—for instance, for determining critical minimal features and discrete vulnerabilities of functional elements required for gene expression, drug resistance, and reversal of disease. By saturating or deep scanning mutagenesis is meant that every or essentially every RNA base is cut within the genomic loci. A library of Cas13c effector protein guide RNAs may be introduced into a population of cells. The library may be introduced, such that each cell receives a single guide RNA (sgRNA). In the case where the library is introduced by transduction of a viral vector, as described herein, a low multiplicity of infection (MOI) is used. The library may include sgRNAs targeting every sequence upstream of a (protospacer adjacent motif) (PAM) sequence in a genomic locus. The library may include at least 100 non-overlapplng genomic sequences upstream of a PAM sequence for every 1000 base pairs within the genomic locus. The library may include sgRNAs targeting sequences upstream of at least one different PAM sequence. The Cas13c effector protein systems may include more than one Cas13c protein. Any Cas13c effector protein as described herein, including orthologues or engineered Cas13c effector proteins that recognize different PAM sequences may be used. The frequency of off target sites for a sgRNA may be less than 500. Off target scores may be generated to select sgRNAs with the lowest off target sites. Any phenotype determined to be associated with cutting at a sgRNA target site may be confirmed by using sgRNAs targeting the same site in a single experiment. Validation of a target site may also be performed by using a modified Cas13c effector protein, as described herein, and two sgRNAs targeting the genomic site of interest. Not being bound by a theory, a target site is a true hit if the change in phenotype is observed in validation experiments.

[0970] The C2c2 effector protein system(s) for saturating or deep scanning mutagenesis can be used in a population of cells. The C2c2 effector protein system(s) can be used in eukaryotic cells, including but not limited to mammalian and plant cells. The population of cells may be prokaryotic cells. The population of eukaryotic cells may be a population of embryonic stem (ES) cells, neuronal cells, epithelial cells, immune cells, endocrine cells, muscle cells, erythrocytes, lymphocytes, plant cells, or yeast cells.

[0971] In one aspect, the present invention provides for a method of screening for functional elements associated with a change in a phenotype. The library may be introduced into a population of cells that are adapted to contain a C2c2 effector protein. The cells may be sorted into at least two groups based on the phenotype. The phenotype may be expression of a gene, cell growth, or cell viability. The relative representation of the guide RNAs present in each group are determined, whereby genomic sites associated with the change in phenotype are determined by the representation of guide RNAs present in each group. The change in phenotype may be a change in expression of a gene of interest. The gene of interest may be upregulated, downregulated, or knocked out. The cells may be sorted into a high expression group and a low expression group. The population of cells may include a reporter construct that is used to determine the phenotype. The reporter construct may include a detectable marker. Cells may be sorted by use of the detectable marker.

[0972] In another aspect, the present invention provides for a method of screening for loci associated with resistance to a chemical compound. The chemical compound may be a drug or pesticide. The library may be introduced into a population of cells that are adapted to contain a C2c2 effector protein, wherein each cell of the population contains no more than one guide RNA; the population of cells are treated with the chemical compound; and the representation of guide RNAs are determined after treatment with the chemical compound at a later time point as compared to an early time point, whereby genomic sites associated with resistance to the chemical compound are determined by enrichment of guide RNAs. Representation of sgRNAs may be determined by deep sequencing methods.

[0973] Useful in the practice of the instant invention utilizing C2c2effector protein complexes are methods used in CRISPR-Cas9 systems and reference is made to the article entitled BCL11A enhancer dissection by Cas9-mediated in situ saturating mutagenesis. Canver, M. C., Smith, E. C., Sher, F., Pinello, L., Sanjana, N. E., Shalem, O., Chen, D. D., Schupp, P. G., Vinjamur, D. S., Garcia, S. P., Luc, S., Kurita, R., Nakamura, Y., Fujiwara, Y., Maeda, T., Yuan, G., Zhang, F., Orkin, S. H., & Bauer, D. E. DOI:10.1038/nature15521, published online Sep. 16, 2015, the article is herein incorporated by reference and discussed briefly below:

[0974] Canver et al. involves novel pooled CRISPR-Cas9 guide RNA libraries to perform in situ saturating mutagenesis of the human and mouse BCL11A erythroid enhancers previously identified as an enhancer associated with fetal hemoglobin (HbF) level and whose mouse ortholog is necessary for erythroid BCL11A expression. This approach revealed critical minimal features and discrete vulnerabilities of these enhancers. Through editing of primary human progenitors and mouse transgenesis, the authors validated the BCL11A erythroid enhancer as a target for HbF reinduction. The authors generated a detailed enhancer map that informs therapeutic genome editing.

### Method of Using C2c2 Systems to Modify a Cell or Organism

[0975] The invention in some embodiments comprehends a method of modifying a cell or organism. The cell may be a prokaryotic cell or a eukaryotic cell. The cell may be a mammalian cell. The mammalian cell many be a non-human primate, bovine, porcine, rodent or mouse cell. The cell may be a non-mammalian eukaryotic cell such as poultry, fish or shrimp. The cell may also be a plant cell. The plant cell may be of a crop plant such as cassava, corn, sorghum, wheat, or rice. The plant cell may also be of an algae, tree or vegetable. The modification introduced to the cell by the present invention may be such that the cell and progeny of the cell are altered for improved production of biologic products such as an antibody, starch, alcohol or other desired cellular output. The modification introduced to the cell by the present invention may be such that the cell and progeny of the cell include an alteration that changes the biologic product produced.

[0976] The system may comprise one or more different vectors. In an aspect of the invention, the effector protein is codon optimized for expression the desired cell type, preferentially a eukaryotic cell, preferably a mammalian cell or a human cell.

[0977] Packaging cells are typically used to form virus particles that are capable of infecting a host cell. Such cells include 293 cells, which package adenovirus, and w2 cells or PA317 cells, which package retrovirus. Viral vectors used in gene therapy are usually generated by producing a cell line that packages a nucleic acid vector into a viral particle. The vectors typically contain the minimal viral sequences required for packaging and subsequent integration into a host, other viral sequences being replaced by an expression cassette for the polynucleotide(s) to be expressed. The missing viral functions are typically supplied in trans by the packaging cell line. For example, AAV vectors used in gene therapy typically only possess ITR sequences from the AAV genome which are required for packaging and integration into the host genome. Viral DNA is packaged in a cell line, which contains a helper plasmid encoding the other AAV genes, namely rep and cap, but lacking ITR sequences. The cell line may also be infected with adenovirus as a helper. The helper virus promotes replication of the AAV vector and expression of AAV genes from the helper plasmid. The helper plasmid is not packaged in significant amounts due to a lack of ITR sequences. Contamination with adenovirus can be reduced by, e.g., heat treatment to which adenovirus is more sensitive than AAV. Additional methods for the delivery of nucleic acids to cells are known to those skilled in the art. See, for example, US20030087817, incorporated herein by reference.

[0978] In some embodiments, a host cell is transiently or non-transiently transfected with one or more vectors described herein. In some embodiments, a cell is transfected as it naturally occurs in a subject. In some embodiments, a cell that is transfected is taken from a subject. In some embodiments, the cell is derived from cells taken from a subject, such as a cell line. A wide variety of cell lines for tissue culture are known in the art. Examples of cell lines include, but are not limited to, C8161, CCRF-CEM, MOLT, mIMCD-3, NHDF, HeLa-S3, Huhl, Huh4, Huh7, HUVEC, HASMC, HEKn, HEKa, MiaPaCell, Pancl, PC-3, TF1, CTLL-2, C1R, Rath, CV1, RPTE, A10, T24, J82, A375, ARH-77, Calul, SW480, SW620, SKOV3, SK-UT, CaCo2, P388D1, SEM-K2, WEHI-231, HB56, TIB55, Jurkat, J45.01, LRMB, Bcl-1, BC-3, IC21, DLD2, Raw264.7, NRK, NRK-52E, MRCS, MEF, Hep G2, HeLa B, HeLa T4, COS, COS-1, COS-6, COS-M6A, BS-C-1 monkey kidney epithelial, BALB/3T3 mouse embryo fibroblast, 3T3 Swiss, 3T3-L1, 132-d5 human fetal fibroblasts; 10.1 mouse fibroblasts, 293-T, 3T3, 721, 9L, A2780, A2780ADR, A2780cis, A172, A20, A253, A431, A-549, ALC, B16, B35, BCP-1 cells, BEAS-2B, bEnd.3, BHK-21, BR 293, BxPC3, C3H-10T1/2, C6/36, Cal-27, CHO, CHO-7, CHO-IR, CHO-K1, CHO-K2, CHO-T, CHO Dhfr −/−, COR-L23, COR-L23/CPR, COR-L23/5010, COR-L23/R23, COS-7, COV-434, CML T1, CMT, CT26, D17, DH82, DU145, DuCaP, EL4, EM2, EM3, EMT6/AR1, EMT6/AR10.0, FM3, H1299, H69, HB54, HB55, HCA2, HEK-293, HeLa, Hepalc1c7, HL-60, HMEC, HT-29, Jurkat, JY cells, K562 cells, Ku812, KCL22, KG1, KYO1, LNCap, Ma-Mel 1-48, MC-38, MCF-7, MCF-10A, MDA-MB-231, MDA-MB-468, MDA-MB-435, MDCK II, MDCK II, MOR/0.2R, MONO-MAC 6, MTD-1A, MyEnd, NCI-H69/CPR, NCI-H69/LX10, NCI-H69/LX20, NCI-H69/LX4, NIH-3T3, NALM-1, NW-145, OPCN/OPCT cell lines, Peer, PNT-1A/PNT 2, RenCa, RIN-5F, RMA/RMAS, Saos-2 cells, Sf-9, SkBr3, T2, T-47D, T84, THP1 cell line, U373, U87, U937, VCaP, Vero cells, WM39, WT-49, X63, YAC-1, YAR, and transgenic varieties thereof. Cell lines are available from a variety of sources known to those with skill in the art (see, e.g., the American Type Culture Collection (ATCC) (Manassas, Va.)). In some embodiments, a cell transfected with one or more vectors described herein is used to establish a new cell line comprising one or more vector-derived sequences. In some embodiments, a cell transiently transfected with the components of a nucleic acid-targeting system as described herein (such as by transient transfection of one or more vectors, or transfection with RNA), and modified through the activity of a nucleic acid-targeting complex, is used to establish a new cell line comprising cells containing the modification but lacking any other exogenous sequence. In some embodiments, cells transiently or non-transiently transfected with one or more vectors described herein, or cell lines derived from such cells are used in assessing one or more test compounds.

[0979] In some embodiments, one or more vectors described herein are used to produce a non-human transgenic animal or transgenic plant. In some embodiments, the transgenic animal is a mammal, such as a mouse, rat, or rabbit. In certain embodiments, the organism or subject is a plant. In certain embodiments, the organism or subject or plant is algae. Methods for producing transgenic plants and animals are known in the art, and generally begin with a method of cell transfection, such as described herein.

[0980] In one aspect, the invention provides for methods of modifying a target polynucleotide in a eukaryotic cell. In some embodiments, the method comprises allowing a nucleic acid-targeting complex to bind to the target polynucleotide to effect cleavage of said target polynucleotide thereby modifying the target polynucleotide, wherein the nucleic acid-targeting complex comprises a nucleic acid-targeting effector protein complexed with a guide RNA hybridized to a target sequence within said target polynucleotide.

[0981] In one aspect, the invention provides a method of modifying expression of a polynucleotide in a eukaryotic cell. In some embodiments, the method comprises allowing a nucleic acid-targeting complex to bind to the polynucleotide such that said binding results in increased or decreased expression of said polynucleotide; wherein the nucleic acid-targeting complex comprises a nucleic acid-targeting effector protein complexed with a guide RNA hybridized to a target sequence within said polynucleotide.

### Cas13c Effector Protein Complexes can be Used in Plants

[0982] The Cas13c effector protein system(s) (e.g., single or multiplexed) can be used in conjunction with recent advances in crop genomics. The systems described herein can be used to perform efficient and cost-effective plant gene or genome interrogation or editing or manipulation—for instance, for rapid investigation and/or selection and/or interrogations and/or comparison and/or manipulations and/or transformation of plant genes or genomes; e.g., to create, identify, develop, optimize, or confer trait(s) or characteristic(s) to plant(s) or to transform a plant genome. There can accordingly be improved production of plants, new plants with new combinations of traits or characteristics or new plants with enhanced traits. The Cas13c effector protein system(s) can be used with regard to plants in Site-Directed Integration (SDI) or Gene Editing (GE) or any Near Reverse Breeding (NRB) or Reverse Breeding (RB) techniques. Aspects of utilizing the herein described Cas13c effector protein systems may be analogous to the use of the CRISPR-Cas (e.g. CRISPR-Cas9) system in plants, and mention is made of the University of Arizona website “CRISPR-PLANT” (www.genome.arizona.edu/crispr/) (supported by Penn State and AGI). Embodiments of the invention can be used in genome editing in plants or where RNAi or similar genome editing techniques have been used previously; see, e.g., Nekrasov, “Plant genome editing made easy: targeted mutagenesis in model and crop plants using the CRISPR-Cas system,” Plant Methods 2013, 9:39 (doi:10.1186/1746-4811-9-39); Brooks, “Efficient gene editing in tomato in the first generation using the CRISPR-Cas9 system,” Plant Physiology September 2014 pp 114.247577; Shan, “Targeted genome modification of crop plants using a CRISPR-Cas system,” Nature Biotechnology 31, 686-688 (2013); Feng, “Efficient genome editing in plants using a CRISPR/Cas system,” Cell Research (2013) 23:1229-1232. doi:10.1038/cr.2013.114; published online 20 Aug. 2013; Xie, “RNA-guided genome editing in plants using a CRISPR-Cas system,” Mol Plant. 2013 November; 6(6):1975-83. doi: 10.1093/mp/sst119. Epub 2013 Aug. 17; Xu, “Gene targeting using the Agrobacterium tumefaciens-mediated CRISPR-Cas system in rice,” Rice 2014, 7:5 (2014), Zhou et al., “Exploiting SNPs for biallelic CRISPR mutations in the outcrossing woody perennial Populus reveals 4-coumarate: CoA ligase specificity and Redundancy,” New Phytologist (2015) (Forum) 1-4 (available online only at www.newphytologist.com); Caliando et al, “Targeted DNA degradation using a CRISPR device stably carried in the host genome, NATURE COMMUNICATIONS 6:6989, DOI: 10.1038/ncomms7989, www.nature.com/naturecommunications DOI: 10.1038/ncomms7989; U.S. Pat. No. 6,603,061—Agrobacterium-Mediated Plant Transformation Method; U.S. Pat. No. 7,868,149—Plant Genome Sequences and Uses Thereof and US 2009/0100536—Transgenic Plants with Enhanced Agronomic Traits, all the contents and disclosure of each of which are herein incorporated by reference in their entirety. In the practice of the invention, the contents and disclosure of Morrell et al “Crop genomics: advances and applications,” Nat Rev Genet. 2011 Dec. 29; 13(2):85-96; each of which is incorporated by reference herein including as to how herein embodiments may be used as to plants. Accordingly, reference herein to animal cells may also apply, mutatis mutandis, to plant cells unless otherwise apparent; and, the enzymes herein having reduced off-target effects and systems employing such enzymes can be used in plant applciations, including those mentioned herein.

[0983] Sugano et al. (Plant Cell Physiol. 2014 March; 55(3):475-81. doi: 10.1093/pcp/pcu014. Epub 2014 Jan. 18) reports the application of CRISPR-Cas9 to targeted mutagenesis in the liverwort Marchantia polymorpha L., which has emerged as a model species for studying land plant evolution. The U6 promoter of M. polymorpha was identified and cloned to express the gRNA. The target sequence of the gRNA was designed to disrupt the gene encoding auxin response factor 1 (ARF1) in M. polymorpha. Using Agrobacterium-mediated transformation, Sugano et al. isolated stable mutants in the gametophyte generation of M. polymorpha. CRISPR-Cas9-based site-directed mutagenesis in vivo was achieved using either the Cauliflower mosaic virus 35S or M. polymorpha EF1a promoter to express Cas9. Isolated mutant individuals showing an auxin-resistant phenotype were not chimeric. Moreover, stable mutants were produced by asexual reproduction of T1 plants. Multiple arf1 alleles were easily established using CRIPSR/Cas9-based targeted mutagenesis. The Cas13c systems of the present invention can be used to regulate the same as well as other genes, and like expression control systems such as RNAi and siRNA, the method of the invention can be inducible and reversible.

[0984] Kabadi et al. (Nucleic Acids Res. 2014 Oct. 29; 42(19):e147. doi: 10.1093/nar/gku749. Epub 2014 Aug. 13) developed a single lentiviral system to express a Cas9 variant, a reporter gene and up to four sgRNAs from independent RNA polymerase III promoters that are incorporated into the vector by a convenient Golden Gate cloning method. Each sgRNA was efficiently expressed and can mediate multiplex gene editing and sustained transcriptional activation in immortalized and primary human cells. The instant invention can be used to regulate the plant genes of Kabadi.

[0985] Xing et al. (BMC Plant Biology 2014, 14:327) developed a CRISPR-Cas9 binary vector set based on the pGreen or pCAMBIA backbone, as well as a gRNA. This toolkit requires no restriction enzymes besides Bsal to generate final constructs harboring maize-codon optimized Cas9 and one or more gRNAs with high efficiency in as little as one cloning step. The toolkit was validated using maize protoplasts, transgenic maize lines, and transgenic Arabidopsis lines and was shown to exhibit high efficiency and specificity. More importantly, using this toolkit, targeted mutations of three Arabidopsis genes were detected in transgenic seedlings of the T1 generation. Moreover, the multiple-gene mutations could be inherited by the next generation. (guide RNA) module vector set, as a toolkit for multiplex genome editing in plants. The Cas13c systems and proteins of the instant invention may be used to target the genes targeted by Xing.

[0986] The Cas13c CRISPR systems of the invention may be used in the detection of plant viruses. Gambino et al. (Phytopathology. 2006 November; 96(11):1223-9. doi: 10.1094/PHYTO-96-1223) relied on amplification and multiplex PCR for simultaneous detection of nine grapevine viruses. The Cas13c systems and proteins of the instant invention may similarly be used to detect multiple targets in a host. Moreover, the systems of the invention can be used to simultaneously knock down viral gene expression in valuable cultivars, and prevent activation or further infection by targeting expressed vial RNA.

[0987] Murray et al. (Proc Biol Sci. 2013 Jun. 26; 280(1765):20130965. doi: 10.1098/rspb.2013.0965; published 2013 Aug. 22) analyzxed 12 plant RNA viruses to investigate evolutionary rates and found evidence of episodic selection possibly due to shifts between different host genotyopes or species. The Cas13c systems and proteins of the instant invention may be used to tarteg or immunize against such viruses in a host. For example, the systems of the invention can be used to block viral RNA expression hence replication. Also, the invention can be used to target nuclic acids for cleavage as wll as to target expression or activation. Moreover, the systems of the invention can be multiplexed so as to hit multiple targets or multiple isolate of the same virus.

[0988] Ma et al. (Mol Plant. 2015 Aug. 3; 8(8):1274-84. doi: 10.1016/j.molp.2015.04.007) reports robust CRISPR-Cas9 vector system, utilizing a plant codon optimized Cas9 gene, for convenient and high-efficiency multiplex genome editing in monocot and dicot plants. Ma et al. designed PCR-based procedures to rapidly generate multiple sgRNA expression cassettes, which can be assembled into the binary CRISPR-Cas9 vectors in one round of cloning by Golden Gate ligation or Gibson Assembly. With this system, Ma et al. edited 46 target sites in rice with an average 85.4% rate of mutation, mostly in biallelic and homozygous status. Ma et al. provide examples of loss-of-function gene mutations in T0 rice and T1Arabidopsis plants by simultaneous targeting of multiple (up to eight) members of a gene family, multiple genes in a biosynthetic pathway, or multiple sites in a single gene. Similarly, the Cas13c systems of the instant invention can dffieicnelty target expression of multiple genes simultaneously.

[0989] Lowder et al. (Plant Physiol. 2015 Aug. 21. pii: pp. 00636.2015) also developed a CRISPR-Cas9 toolbox enables multiplex genome editing and transcriptional regulation of expressed, silenced or non-coding genes in plants. This toolbox provides researchers with a protocol and reagents to quickly and efficiently assemble functional CRISPR-Cas9 T-DNA constructs for monocots and dicots using Golden Gate and Gateway cloning methods. It comes with a full suite of capabilities, including multiplexed gene editing and transcriptional activation or repression of plant endogenous genes. T-DNA based transformation technology is fundamental to modern plant biotechnology, genetics, molecular biology and physiology. As such, we developed a method for the assembly of Cas9 (WT, nickase or dCas9) and gRNA(s) into a T-DNA destination-vector of interest. The assembly method is based on both Golden Gate assembly and MultiSite Gateway recombination. Three modules are required for assembly. The first module is a Cas9 entry vector, which contains promoterless Cas9 or its derivative genes flanked by attL1 and attR5 sites. The second module is a gRNA entry vector which contains entry gRNA expression cassettes flanked by attL5 and attL2 sites. The third module includes attR1-attR2-containing destination T-DNA vectors that provide promoters of choice for Cas9 expression. The toolbox of Lowder et al. may be applied to the Cas13c effector protein system of the present invention.

[0990] Organisms such as yeast and microalgae are widely used for synthetic biology. Stovicek et al. (Metab. Eng. Comm., 2015; 2:13 describes genome editing of industrial yeast, for example, Saccharomyces cerevisae, to efficiently produce robust strains for industrial production. Stovicek used a CRISPR-Cas9 system codon-optimized for yeast to simultaneously disrupt both alleles of an endogenous gene and knock in a heterologous gene. Cas9 and gRNA were expressed from genomic or episomal 2μ-based vector locations. The authors also showed that gene disruption efficiency could be improved by optimization of the levels of Cas9 and gRNA expression. Hlavová et al. (Biotechnol. Adv. 2015) discusses development of species or strains of microalgae using techniques such as CRISPR to target nuclear and chloroplast genes for insertional mutagenesis and screening. The same plasmids and vectors can be appliced to the Cas13c systems of the instant invention.

[0991] Petersen (“Towards precisely glycol engineered plants,” Plant Biotech Denmark Annual meeting 2015, Copenhagen, Denmark) developed a method of using CRISPR/Cas9 to engineer genome changes in Arabidopsis, for example to glyco engineer Arabidopsis for production of proteins and products having desired posttranslational modifications. Hebelstrup et al. (Front Plant Sci. 2015 Apr. 23; 6:247) outlines in planta starch bioengineering, providing crops that express starch modifying enzymes and directly produce products that normally are made by industrial chemical and/or physical treatments of starches. The methods of Petersen and Hebelstrup may be applied to the Cas13c effector protein system of the present invention.

[0992] Kurthe t al, J Virol. 2012 June; 86(11):6002-9. doi: 10.1128/JVI.00436-12. Epub 2012 Mar. 21) developed an RNA virus-based vector for the introduction of desired traits into grapevine without heritable modifications to the genome. The vector provided the ability to regulate expression of of endogenous genes by virus-induced gene silencing. The Cas13c systems and proteins of the instant invention can be used to silence genes and proteins without heritable modification to the genome.

[0993] In an embodiment, the plant may be a legume. The present invention may utilize the herein disclosed CRISP-Cas system for exploring and modifying, for example, without limitation, soybeans, peas, and peanuts. Curtin et al. provides a toolbox for legume function genomics. (See Curtin et al., “A genome engineering toolbox for legume Functional genomics,” International Plant and Animal Genome Conference XXII 2014). Curtin used the genetic transformation of CRISPR to knock-out/down single copy and duplicated legume genes both in hairy root and whole plant systems. Some of the target genes were chosen in order to explore and optimize the features of knock-out/down systems (e.g., phytoene desaturase), while others were identified by soybean homology to Arabidopsis Dicer-like genes or by genome-wide association studies of nodulation in Medicago. The Cas13c systems and proteins of the instant invention can be used to knockout/knockdown systems.

[0994] Peanut allergies and allergies to legumes generally are a real and serious health concern. The Cas13c effector protein system of the present invention can be used to identify and then edit or silence genes encoding allergenic proteins of such legumes. Without limitation as to such genes and proteins, Nicolaou et al. identifies allergenic proteins in peanuts, soybeans, lentils, peas, lupin, green beans, and mung beans. See, Nicolaou et al., Current Opinion in Allergy and Clinical Immunology 2011; 11(3):222).

[0995] In an advantageous embodiment, the plant may be a tree. The present invention may also utilize the herein disclosed CRISPR Cas system for herbaceous systems (see, e.g., Belhaj et al., Plant Methods 9: 39 and Harrison et al., Genes & Development 28: 1859-1872). In a particularly advantageous embodiment, the CRISPR Cas system of the present invention may target single nucleotide polymorphisms (SNPs) in trees (see, e.g., Zhou et al., New Phytologist, Volume 208, Issue 2, pages 298-301, October 2015). In the Zhou et al. study, the authors applied a CRISPR Cas system in the woody perennial Populus using the 4-coumarate:CoA ligase (4CL) gene family as a case study and achieved 100% mutational efficiency for two 4CL genes targeted, with every transformant examined carrying biallelic modifications. In the Zhou et al., study, the CRISPR-Cas9 system was highly sensitive to single nucleotide polymorphisms (SNPs), as cleavage for a third 4CL gene was abolished due to SNPs in the target sequence. These methods may be applied to the Cas13c effector protein system of the present invention.

[0996] The methods of Zhou et al. (New Phytologist, Volume 208, Issue 2, pages 298-301, October 2015) may be applied to the present invention as follows. Two 4CL genes, 4CL1 and 4CL2, associated with lignin and flavonoid biosynthesis, respectively are targeted for CRISPR-Cas9 editing. The Populus tremula×alba clone 717-1B4 routinely used for transformation is divergent from the genome-sequenced Populus trichocarpa. Therefore, the 4CL1 and 4CL2 gRNAs designed from the reference genome are interrogated with in-house 717 RNA-Seq data to ensure the absence of SNPs which could limit Cas efficiency. A third gRNA designed for 4CL5, a genome duplicate of 4CL1, is also included. The corresponding 717 sequence harbors one SNP in each allele near/within the PAM, both of which are expected to abolish targeting by the 4CL5-gRNA. All three gRNA target sites are located within the first exon. For 717 transformation, the gRNA is expressed from the Medicago U6.6 promoter, along with a human codon-optimized Cas under control of the CaMV 35S promoter in a binary vector. Transformation with the Cas-only vector can serve as a control. Randomly selected 4CL1 and 4CL2 lines are subjected to amplicon-sequencing. The data is then processed and biallelic mutations are confirmed in all cases. These methods may be applied to the Cas13c effector protein system of the present invention.

[0997] In plants, pathogens are often host-specific. For example, Fusarium oxysporum f. sp. lycopersici causes tomato wilt but attacks only tomato, and F. oxysporum f. dianthii Puccinia graminis f. sp. tritici attacks only wheat. Plants have existing and induced defenses to resist most pathogens. Mutations and recombination events across plant generations lead to genetic variability that gives rise to susceptibility, especially as pathogens reproduce with more frequency than plants. In plants there can be non-host resistance, e.g., the host and pathogen are incompatible. There can also be Horizontal Resistance, e.g., partial resistance against all races of a pathogen, typically controlled by many genes and Vertical Resistance, e.g., complete resistance to some races of a pathogen but not to other races, typically controlled by a few genes. In a Gene-for-Gene level, plants and pathogens evolve together, and the genetic changes in one balance changes in other. Accordingly, using Natural Variability, breeders combine most useful genes for Yield, Quality, Uniformity, Hardiness, Resistance. The sources of resistance genes include native or foreign Varieties, Heirloom Varieties, Wild Plant Relatives, and Induced Mutations, e.g., treating plant material with mutagenic agents. Using the present invention, plant breeders are provided with a new tool to induce mutations. Accordingly, one skilled in the art can analyze the genome of sources of resistance genes, and in Varieties having desired characteristics or traits employ the present invention to induce the rise of resistance genes, with more precision than previous mutagenic agents and hence accelerate and improve plant breeding programs.

[0998] Aside from the plants otherwise discussed herein and above, engineered plants modified by the effector protein and suitable guide, and progeny thereof, as provided. These may include disease or drought resistant crops, such as wheat, barley, rice, soybean or corn; plants modified to remove or reduce the ability to self-pollinate (but which can instead, optionally, hybridise instead); and allergenic foods such as peanuts and nuts where the immunogenic proteins have been disabled, destroyed or disrupted by targeting via a effector protein and suitable guide.

### Therapeutic Treatment

[0999] The system of the invention can be applied in areas of former RNA cutting technologies, without undue experimentation, from this disclosure, including therapeutic, assay and other applications, because the present application provides the foundation for informed engineering of the system. The present invention provides for therapeutic treatment of a disease caused by overexpression of RNA, toxic RNA and/or mutated RNA (such as, for example, splicing defects or truncations). Expression of the toxic RNA may be associated with formation of nuclear inclusions and late-onset degenerative changes in brain, heart or skeletal muscle. In the best studied example, myotonic dystrophy, it appears that the main pathogenic effect of the toxic RNA is to sequester binding proteins and compromise the regulation of alternative splicing (Hum. Mol. Genet. (2006) 15 (suppl 2): R162-R169). Myotonic dystrophy [dystrophia myotonica (DM)] is of particular interest to geneticists because it produces an extremely wide range of clinical features. A partial listing would include muscle wasting, cataracts, insulin resistance, testicular atrophy, slowing of cardiac conduction, cutaneous tumors and effects on cognition. The classical form of DM, which is now called DM type 1 (DM1), is caused by an expansion of CTG repeats in the 3′-untranslated region (UTR) of DMPK, a gene encoding a cytosolic protein kinase.

[1000] The below table presents a list of exons shown to have misregulated alternative splicing in DM1 skeletal muscle, heart or brain.

| | |
|---|---|
| Tissue/gene Target | Reference |

Skeletal muscle

| | | |
|---|---|---|
| ALP | ex 5a, 5b | Lin X., et al. Failure of MBNL1-dependent postnatal splicing |
| | | transitions in myotonic dystrophy. Hum. Mol. Genet 2006; |
| | | 15: 2087-2097 |
| CAPN3 | ex 16 | Lin X., et al. Failure of MBNL1-dependent postnatal splicing |
| | | transitions in myotonic dystrophy. Hum. Mol. Genet 2006; |
| | | 15: 2087-2097 |
| CLCN1 | int 2, ex 7a, 8a | Mankodi A., et al. Expanded CUG repeats trigger aberrant splicing of |
| | | ClC-1 chloride channel pre-mRNA and hyperexcitability of skeletal |
| | | muscle in myotonic dystrophy. Mol. Cell 2002; 10: 35-44 |
| | | Charlet-B N., et al. Loss of the muscle-specific chloride channel in |
| | | type 1 myotonic dystrophy due to misregulated alternative splicing. |
| | | Mol. Cell 2002; 10: 45-53 |
| FHOS | ex 11a | Lin X., et al. Failure of MBNL1-dependent postnatal splicing |
| | | transitions in myotonic dystrophy. Hum. Mol. Genet 2006; |
| | | 15: 2087-2097 |
| GFAT1 | ex 10 | Lin X., et al. Failure of MBNL1-dependent postnatal splicing |
| | | transitions in myotonic dystrophy. Hum. Mol. Genet 2006; |
| | | 15: 2087-2097 |
| IR | ex 11 | Savkur R. S., et al. Aberrant regulation of insulin receptor alternative |
| | | splicing is associated with insulin resistance in myotonic dystrophy. |
| | | Nat. Genet. 2001; 29: 40-47 |
| MBNL1 | ex 7 | Lin X., et al. Failure of MBNL1-dependent postnatal splicing |
| | | transitions in myotonic dystrophy. Hum. Mol. Genet 2006; |
| | | 15: 2087-2097 |
| MBNL2 | ex 7 | Lin X., et al. Failure of MBNL1-dependent postnatal splicing |
| | | transitions in myotonic dystrophy. Hum. Mol. Genet 2006; |
| | | 15: 2087-2097 |
| MTMR1 | ex 2.1, 2.2 | Buj-Bello A., et al. Muscle-specific alternative splicing of |
| | | myotubularin-related 1 gene is impaired in DM1 muscle cells. Hum. |
| | | Mol. Genet. 2002; 11: 2297-2307 |
| NRAP | ex 12 | Lin X., et al. Failure of MBNL1-dependent postnatal splicing |
| | | transitions in myotonic dystrophy. Hum. Mol. Genet 2006; |
| | | 15: 2087-2097 |
| RYR1 | ex 70 | Kimura T., et al. Altered mRNA splicing of the skeletal muscle |
| | | ryanodine receptor and sarcoplasmic/endoplasmic reticulum Ca2+- |
| | | ATPase in myotonic dystrophy type 1. Hum. Mol. Genet. |
| | | 2005; 14: 2189-2200 |
| SERCA1 | ex 22 | Kimura T., et al. Altered mRNA splicing of the skeletal muscle |
| | | ryanodine receptor and sarcoplasmic/endoplasmic reticulum Ca2+- |
| | | ATPase in myotonic dystrophy type 1. Hum. Mol. Genet. |
| | | 2005; 14: 2189-2200 |
| | | Lin X., et al. Failure of MBNL1-dependent postnatal splicing |
| | | transitions in myotonic dystrophy. Hum. Mol. Genet 2006; |
| | | 15: 2087-2097 |
| z-Titin | ex Zr4, Zr5 | Lin X., et al. Failure of MBNL1-dependent postnatal splicing |
| | | transitions in myotonic dystrophy. Hum. Mol. Genet 2006; |
| | | 15: 2087-2097 |
| m-Titin | M-line ex5 | Lin X., et al. Failure of MBNL1-dependent postnatal splicing |
| | | transitions in myotonic dystrophy. Hum. Mol. Genet 2006; |
| | | 15: 2087-2097 |
| TNNT3 | fetal ex | Kanadia R. N., et al. A muscleblind knockout model for myotonic |
| | | dystrophy. Science 2003; 302: 1978-1980 |
| ZASP | ex 11 | Lin X., et al. Failure of MBNL1-dependent postnatal splicing |
| | | transitions in myotonic dystrophy. Hum. Mol. Genet 2006; |
| | | 15: 2087-2097 |

Heart

| | | |
|---|---|---|
| TNNT2 | ex 5 | Philips A. V., et al. Disruption of splicing regulated by a CUG-binding |
| | | protein in myotonic dystrophy. Science 1998; 280: 737-741 |
| ZASP | ex 11 | Mankodi A., et al. Nuclear RNA foci in the heart in myotonic |
| | | dystrophy. Circ. Res. 2005; 97: 1152-1155 |
| m-Titin | M-line ex 5 | Mankodi A., et al. Nuclear RNA foci in the heart in myotonic |
| | | dystrophy. Circ. Res. 2005; 97: 1152-1155 |
| KCNAB1 | ex 2 | Mankodi A., et al. Nuclear RNA foci in the heart in myotonic |
| | | dystrophy. Circ. Res. 2005; 97: 1152-1155 |
| ALP | ex 5 | (Mankodi A., et al. Nuclear RNA foci in the heart in myotonic |
| | | dystrophy. Circ. Res. 2005; 97: 1152-1155 |

Brain

| | | |
|---|---|---|
| TAU | ex 2, ex 10 | Sergeant N., et al. Dysregulation of human brain microtubule- |
| | | associated tau mRNA maturation in myotonic dystrophy type 1. Hum. |
| | | Mol. Genet. 2001; 10: 2143-2155 |
| | | Jiang H., et al. Myotonic dystrophy type 1 associated with nuclear foci |
| | | of mutant RNA, sequestration of muscleblind proteins, and |
| | | deregulated alternative splicing in neurons. Hum. Mol. Genet. |
| | | 2004; 13: 3079-3088 |
| APP | ex 7 | Jiang H., et al. Myotonic dystrophy type 1 associated with nuclear foci |
| | | of mutant RNA, sequestration of muscleblind proteins, and |
| | | deregulated alternative splicing in neurons. Hum. Mol. Genet. |
| | | 2004; 13: 3079-3088 |
| NMDAR1 | ex 5 | Jiang H., et al. Myotonic dystrophy type 1 associated with nuclear foci |
| | | of mutant RNA, sequestration of muscleblind proteins, and |
| | | deregulated alternative splicing in neurons. Hum. Mol. Genet. |
| | | 2004; 13: 3079-3088 |

[1001] The enzymes of the present invention may target overexpressed RNA or toxic RNA, such as for example, the DMPK gene or any of the misregulated alternative splicing in DM1 skeletal muscle, heart or brain in, for example, the above table.

[1002] The enzymes of the present invention may also target trans-acting mutations affecting RNA-dependent functions that cause disease (summarized in Cell. 2009 Feb. 20; 136(4): 777-793) as indicated in the below table.

| DISEASE | GENE/MUTATION | FUNCTION |
|---|---|---|
| Prader Willi syndrome | SNORD116 | ribosome biogenesis |
| Spinal muscular atrophy | SMN2 | splicing |
| (SMA) | | |
| Dyskeratosis congenita | DKC1 | telomerase/ |
| (X-linked) | | translation |
| Dyskeratosis congenita | TERC | telomerase |
| (autosomal dominant) | | |
| Dyskeratosis congenita | TERT | telomerase |
| (autosomal dominant) | | |
| Diamond-Blackfan anemia | RPS19, RPS24 | ribosome biogenesis |
| Shwachman-Diamond | SBDS | ribosome biogenesis |
| syndrome | | |
| Treacher-Collins syndrome | TCOF1 | ribosome biogenesis |
| Prostate cancer | SNHG5 | ribosome biogenesis |
| Myotonic dystrophy, type 1 | DMPK (RNA gain-of- | protein kinase |
| (DM1) | function) | |
| Myotonic dystrophy type 2 | ZNF9 (RNA gain-of- | RNA binding |
| (DM2) | function) | |
| Spinocerebellar ataxia 8 | ATXN8/ATXN8OS | unknown/noncoding |
| (SCA8) | (RNA gain-of- | RNA |
| | function) | |
| Huntington's disease-like 2 | JPH3 (RNA gain-of- | ion channel |
| (HDL2) | function) | function |
| Fragile X-associated tremor | FMR1 (RNA gain-of- | translation/mRNA |
| ataxia syndrome (FXTAS) | function) | localization |
| Fragile X syndrome | FMR1 | translation/mRNA |
| | | localization |
| X-linked mental retardation | UPF3B | translation/nonsense |
| | | mediated decay |
| Oculopharyngeal muscular | PABPN1 | 3′ end formation |
| dystrophy (OPMD) | | |
| Human pigmentary | DSRAD | editing |
| genodermatosis | | |
| Retinitis pigmentosa | PRPF31 | splicing |
| Retinitis pigmentosa | PRPF8 | splicing |
| Retinitis pigmentosa | HPRP3 | splicing |
| Retinitis pigmentosa | PAP1 | splicing |
| Cartilage-hair hypoplasia | RMRP | splicing |
| (recessive) | | |
| Autism | 7q22-q33 locus | noncoding RNA |
| | breakpoint | |
| Beckwith-Wiedemann | H19 | noncoding RNA |
| syndrome (BWS) | | |
| Charcot-Marie-Tooth | GRS | translation |
| (CMT) Disease | | |
| Charcot-Marie-Tooth | YRS | translation |
| (CMT) Disease | | |
| Amyotrophic lateral | TARDBP | splicing, |
| sclerosis (ALS) | | transcription |
| Leukoencephalopathy with | EIF2B1 | translation |
| vanishing white matter | | |
| Wolcott-Rallison | EIF2AK3 | translation |
| syndrome | | (protease) |
| Mitochondrial myopathy | PUS1 | translation |
| and sideroblastic | | |
| anemia (MLASA) | | |
| Encephalomyopathy and | TSFM | translation |
| hypertrophic | | (mitochondrial) |
| cardiomyopathy | | |
| Hereditary spastic | SPG7 | ribosome biogenesis |
| paraplegia | | |
| Leukoencephalopathy | DARS2 | translation |
| | | (mitochondrial) |
| Susceptibility to | LARS2 | translation |
| diabetes mellitus | | (mitochondrial) |
| Deafness | MTRNR1 | ribosome biogenesis |
| | | (mitochondrial) |
| MELAS syndrome, | MTRNR2 | ribosome biogenesis |
| deafness | | (mitochondrial) |
| Cancer | SFRS1 | splicing, |
| | | translation, |
| | | export |
| Cancer | RBM5 | splicing |
| Multiple disorders | mitochondrial tRNA | translation |
| | mutations | (mitochondrial) |
| Cancer | miR-17-92 cluster | RNA interference |
| Cancer | miR-372/miR-373 | RNA interference |

[1003] The enzyme of the present invention may also be used in the treatment of various tauopathies, including primary and secondary tauopathies, such as primary age-related tauopathy (PART)/Neurofibrillary tangle-predominant senile dementia, with NFTs similar to AD, but without plaques, dementia pugilistica (chronic traumatic encephalopathy), progressive supranuclear palsy, corticobasal degeneration, frontotemporal dementia and parkinsonism linked to chromosome 17, lytico-Bodig disease (Parkinson-dementia complex of Guam), ganglioglioma and gangliocytoma, meningioangiomatosi s, postencephalitic parkinsoni sm, subacute sclerosing panencephalitis, as well as lead encephalopathy, tuberous sclerosis, Hallervorden-Spatz disease, and lipofuscinosis, alzheimers disease. The enzymes of the present invention may also target mutations disrupting the cis-acting splicing code cause splicing defects and disease (summarized in Cell. 2009 Feb. 20; 136(4): 777-793). The motor neuron degenerative disease SMA results from deletion of the SMN1 gene. The remaining SMN2 gene has a C→T substitution in exon 7 that inactivates an exonic splicing enhancer (ESE), and creates an exonic splicing silencer (ESS), leading to exon 7 skipping and a truncated protein (SMNA7). A T→A substitution in exon 31 of the dystrophin gene simultaneously creates a premature termination codon (STOP) and an ESS, leading to exon 31 skipping. This mutation causes a mild form of DMD because the mRNA lacking exon 31 produces a partially functional protein. Mutations within and downstream of exon 10 of the MAPT gene encoding the tau protein affect splicing regulatory elements and disrupt the normal 1:1 ratio of mRNAs including or excluding exon 10. This results in a perturbed balance between tau proteins containing either four or three microtubule-binding domains (4R-tau and 3R-tau, respectively), causing the neuropathological disorder FTDP-17. The example shown is the N279K mutation which enhances an ESE function promoting exon 10 inclusion and shifting the balance toward increased 4R-tau. Polymorphic (UG)m(U)n tracts within the 3′ splice site of the CFTR gene exon 9 influence the extent of exon 9 inclusion and the level of full-length functional protein, modifying the severity of cystic fibrosis (CF) caused by a mutation elsewhere in the CFTR gene.

[1004] The innate immune system detects viral infection primarily by recognizing viral nucleic acids inside an infected cell, referred to as DNA or RNA sensing. In vitro RNA sensing assays can be used to detect specific RNA substrates. The RNA targeting effector protein can for instance be used for RNA-based sensing in living cells. Examples of applications are diagnostics by sensing of, for examples, disease-specific RNAs.

[1005] The RNA targeting effector protein of the invention can further be used for antiviral activity, in particular against RNA viruses. The effector protein can be targeted to the viral RNA using a suitable guide RNA selective for a selected viral RNA sequence. In particular, the effector protein may be an active nuclease that cleaves RNA, such as single stranded RNA. provided is therefore the use of an RNA targeting effector protein of the invention as an antiviral agent.

[1006] Therapeutic dosages of the enzyme system of the present invention to target RNA the above-referenced RNAs are contemplated to be about 0.1 to about 2 mg/kg the dosages may be administered sequentially with a monitored response, and repeated dosages if necessary, up to about 7 to 10 doses per patient. Advantageously, samples are collected from each patient during the treatment regimen to ascertain the effectiveness of treatment. For example, RNA samples may be isolated and quantified to determine if expression is reduced or ameliorated. Such a diagnostic is within the purview of one of skill in the art.

### Transcript Detection Methods

[1007] The effector proteins and systems of the invention are useful for specific detection of RNAs in a cell or other sample. In the presence of an RNA target of interest, guide-dependent Cas13c nuclease activity may be accompanied by non-specific RNAse activity against collateral targets. To take advantage of the RNase activity, all that is needed is a reporter substrate that can be detectably cleaved. For example, a reporter molecule can comprise RNA, tagged with a fluorescent reporter molecule (fluor) on one end and a quencher on the other. In the absence of Cas13c RNase activity, the physical proximity of the quencher dampens fluorescence from the fluor to low levels. When Cas13c target specific cleavage is activated by the presence of an RNA target-of-interest and suitable guide RNA, the RNA-containing reporter molecule is non-specifically cleaved and the fluor and quencher are spatially separated. This causes the fluor to emit a detectable signal when excited by light of the appropriate wavelength.

[1008] In an aspect, the invention relates to a (target) RNA detection system comprising an RNA targeting effector; one or more guide RNAs designed to bind to the corresponding RNA target; and an RNA-based cleavage inducible reporter construct. In another aspect, the invention relates to a method for (target) RNA detection in a sample, comprising adding an RNA targeting effector, one or more guide RNAs designed to bind to said (target) RNA, and an RNA-based cleavage inducible reporter construct to said sample. In a further aspect, the invention relates to a kit or device comprising the (target) RNA detection system as defined herein, or a kit or device comprising at least the RNA targeting effector and the RNA-based cleavage inducible reporter construct. In a further aspect, the invention relates to the use of the RNA targeting system or kit or device as defined herein for (target) RNA detection. The RNA targeting effector in certain embodiments is an RNA guided RNAse. In certain embodiments, the RNA targeting effector is is a CRISPR effector. In certain embodiments, the RNA targeting effector is a class 2 CRISPR effector. In certain embodiments, the RNA targeting effector is a class 2, type VI CRISPR effector. In a preferred embodiment, the RNA targeting effector is Cas13c. In certain embodiments, the RNA targeting effector, preferably Cas13c, is derived from a species as described herein elsewhere. It will be understood that the guide RNA designed to bind to said (target) RNA as described herein is capable of forming a complex with the RNA targeting effector and wherein the guide RNA in said complex is capable of binding to a target RNA molecule and whereby the target RNA is cleaved, as also described herein elsewhere. It will be understood that the guide RNA typically comprises a guide sequence and a direct repeat, as described herein elsewhere. In certain embodiments, the one or more guide RNAs are designed to bind to one or more target molecules that are diagnostic for a disease state. In certain embodiments, the disease state is infection, such as viral, bacterial, fungal, or parasitic infection. In certain embodiments, the disease state is characterised by aberrant (target) RNA expression. In certain embodiments, the disease state is cancer. In certain embodiments, the disease state is autoimmune disease. The RNA-based cleavage inducible reporter construct comprises RNA and cleavage of the RNA results in a detectable readout, i.e. a detectable signal is generated upon cleavage of the RNA. In certain embodiments, the RNA-based cleavage inducible reporter construct comprises a fluorochrome and a quencher. The skilled person will understand that different types of fluorochromes and corresponding quenchers may be used. The skilled person will readily envisage other types of inducible reporter systems which may be adapted for use in the present RNA cleavage reporter constructs.

[1009] In one exemplary assay method, Cas13c effector, target-of-interest-specific guide RNA, and reporter molecule are added to a cellular sample. An increase in fluorescence indicates the presence of the RNA target-of-interest. In another exemplary method, a detection array is provided. Each location of the array is provided with Cas13c effector, reporter molecule, and a target-of-interest-specific guide RNA. Depending on the assay to be performed, the target-of-interest-specific guide RNAs at each location of the array can be the same, different, or a combination thereof. Different target-of-interest-specific guide RNAs might be provided, for example when it is desired to test for one or more targets in a single source sample. The same target-of-interest-specific guide RNA might be provided at each location, for example when it is desired to test multiple samples for the same target.

[1010] As used herein, a “masking construct” refers to a molecule that can be cleaved or otherwise deactivated by an activated CRISPR system effector protein described herein. In certain example embodiments, the masking construct is a RNA-based masking construct. The masking construct prevents the generation or detection of a positive detectable signal. A positive detectable signal may be any signal that can be detected using optical, fluorescent, chemiluminescent, electrochemical or other detection methods known in the art. The masking construct may prevent the generation of a detectable positive signal or mask the presence of a detectable positive signal until the masking construct is removed or otherwise silenced. The term “positive detectable signal” is used to differentiate from other detectable signals that may be detectable in the presence of the masking construct. For example, in certain embodiments a first signal may be detected when the masking agent is present (i.e. a negative detectable signal), which then converts to a second signal (e.g. the positive detectable signal) upon detection of the target molecules and cleavage or deactivation of the masking agent by the activated CRISPR effector protein.

[1011] In certain example embodiments, the masking construct may suppress generation of a gene product. The gene product may be encoded by a reporter construct that is added to the sample. The masking construct may be an interfering RNA involved in a RNA interference pathway, such as a shRHN or siRNA. The masking construct may also comprise microRNA (miRNA). While present, the masking construct suppresses expression of the gene product. The gene product may be a fluorescent protein or other RNA transcript or proteins that would otherwise be detectable by a labeled probe or antibody but for the presence of the masking construct. Upon activation of the effector protein the masking construct is cleaved or otherwise silenced allowing for expression and detection of the gene product as the positive detectable signal.

[1012] In certain example embodiments, the masking construct may sequester one or more reagents needed to generate a detectable positive signal such that release of the one or more reagents from the masking construct results in generation of the detectable positive signal. The one or more reagents may combine to produce a colorimetric signal, a chemiluminescent signal, a fluorescent signal, or any other detectable signal and may comprise any reagents known to be suitable for such a purpose. In certain example embodiments, the one or more reagents are sequestered by RNA aptamers that bind the one or more reagents. The one or more reagents are released when the effector protein is activated upon detection of a target molecule. In certain example embodiments, the one or more reagents is a protein, such as an enzyme, capable of facilitating generation of a detectable signal, such as a colorimetric, chemiluminescent, or fluorescent signal, that is inhibited or sequestered such that the protein cannot generate the detectable signal by the binding of one or more RNA aptamers to the protein. Upon activation of the effector proteins disclosed herein, the RNA aptamers are cleaved or degraded to the extent they no longer inhibit the protein's ability to generate the detectable signal.

[1013] In one embodiment, thrombin is used as a signal amplification enzyme with an inhibitory aptamer, for example having the following sequence: GGGAACAAAGCUGAAGUACUUACCC (SEQ ID No. 29). When this aptamer is cleaved, thrombin becomes active and will cleave a peptide colorimetric substrate (see, e.g., www.sigmaaldrich.com/catalog/product/sigma/t3068?lang=en&region=US) or fluorescent substrate (see, e.g., www.sigmaaldrich.com/catalog/product/sigma/b9385?lang=en&region=US). The colorimetric substrate, para-nitroanilide (pNA), is covalently linked to the peptide substrate for thrombin. Upon cleavage by thrombin, pNA is released and becomes yellow in color and easily visible by eye. The fluorescent substrate operates by a similar principle and, upon cleavage by thrombin, releases 7-amino-4-methylcoumarin, a blue fluorophore that can be detected using a fluorescence detector. Alternatives to thrombin include horseradish peroxidase (HRP), β-galactosidase, and calf alkaline phosphatase (CAP) which can similarly be used to generate a colorimetric or fluorescent signal, and be inhibited by an inhibitory aptamer.

[1014] In certain example embodiments, the masking construct may be immobilized on a solid substrate in an individual discrete volume (defined further below) and sequesters a single reagent. For example, the reagent may be a bead comprising a dye. When sequestered by the immobilized reagent, the individual beads are too diffuse to generate a detectable signal, but upon release from the masking construct are able to generate a detectable signal, for example by aggregation or simple increase in solution concentration. In certain example embodiments, the immobilized masking agent is a RNA-based aptamer that can be cleaved by the activated effector protein upon detection of a target molecule.

[1015] In certain other example embodiments, the masking construct binds to an immobilized reagent in solution thereby blocking the ability of the reagent to bind to a separate labeled binding partner that is free in solution. Thus, upon application of a washing step to a sample, the labeled binding partner can be washed out of the sample in the absence of a target molecule. However, if the effector protein is activated, the masking construct is cleaved to a degree sufficient to interfere with the ability of the masking construct to bind the reagent thereby allowing the labeled binding partner to bind to the immobilized reagent. Thus, the labeled binding partner remains after the wash step indicating the presence of the target molecule in the sample. In certain aspects, the masking construct that binds the immobilized reagent is a RNA aptamer. The immobilized reagent may be a protein and the labeled minding partner may be a labeled antibody. Alternatively, the immobilized reagent may be a streptavidin and the labeled binding partner may be labeled biotin. The label on the binding partner used in the above embodiments may be any detectable label known in the art. In addition, other known binding partners may be used in accordance with the overall design described here.

[1016] In certain example embodiments, the masking construct may comprise a ribozyme. Ribozymes are RNA molecules having catalytic properties. As ribozymes, both naturally and engineered, comprise or consist of RNA, that may be targeted by the effector proteins disclosed herein. The ribozyme may be selected or engineered to catalyze a reaction that either generates a negative detectable signal or prevents generation of a positive control signal. Upon deactivation of the ribozyme by the activated effector protein molecule the reaction generating a negative controls signal or preventing generation of a positive detectable signal is removed, thereby allowing a positive detectable signal to be detected. In one example embodiment, the ribozyme may catalyze a colorimetric reaction causing a solution to appear as a first color. When the ribozyme is deactivated the solution then turns to a second color, the second color being the detectable positive signal. An example of how ribozymes can be used to catalyze a colorimetric reaction are described in Zhao et al. “Signal amplification of glucosamine-6-phosphate based on ribozyme glmS,” Biosens Bioelectron. 2014; 16:337-42, and provide an example of how such a system could be modified to work in the context of the embodiments disclosed herein. Alternatively, ribozymes, when present can generate cleavage products of, for example, RNA transcripts. Thus, detection of a positive detectable signal may comprise detection of non-cleaved RNA transcripts that are only generated in the absence of the ribozyme.

[1017] In one example embodiment, the masking construct comprises a detection agent that changes color depending on whether the detection agent is aggregated or dispersed in solution. For example, certain nanoparticles, such as colloidal gold, undergo a visible purple to red color shift as they move from aggregates to dispersed particles. Accordingly, in certain example embodiments, such detection agents may be held in aggregate by one or more bridge molecules. At least a portion of the bridge molecule comprises RNA. Upon activation of the effector proteins disclosed herein, the RNA portion of the bridge molecule is cleaved allowing the detection agent to disperse and resulting in the corresponding change in color. In certain example embodiments, the bridge molecule is a RNA molecule. In certain example embodiments, the detection agent is a colloidal metal. The colloidal metal material may include water-insoluble metal particles or metallic compounds dispersed in a liquid, a hydrosol, or a metal sol. The colloidal metal may be selected from the metals in groups IA, IB, IIB and IIIB of the periodic table, as well as the transition metals, especially those of group VIII. Preferred metals include gold, silver, aluminum, ruthenium, zinc, iron, nickel and calcium. Other suitable metals also include the following in all of their various oxidation states: lithium, sodium, magnesium, potassium, scandium, titanium, vanadium, chromium, manganese, cobalt, copper, gallium, strontium, niobium, molybdenum, palladium, indium, tin, tungsten, rhenium, platinum, and gadolinium. The metals are preferably provided in ionic form, derived from an appropriate metal compound, for example the Al³⁺, Ru³⁺, Zn²⁺, Fe³⁺, Ni²⁺ and Ca²⁺ ions

[1018] In certain other example embodiments, the masking construct may comprise an RNA oligonucleotide to which are attached a detectable label and a masking agent of that detectable label. An example of such a detectable label/masking agent pair is a fluorophore and a quencher of the fluorophore. Quenching of the fluorophore can occur as a result of the formation of a non-fluorescent complex between the fluorophore and another fluorophore or non-fluorescent molecule. This mechanism is known as ground-state complex formation, static quenching, or contact quenching. Accordingly, the RNA oligonucleotide may be designed so that the fluorophore and quencher are in sufficient proximity for contact quenching to occur. Fluorophores and their cognate quenchers are known in the art and can be selected for this purpose by one having ordinary skill in the art. The particular fluorophore/quencher pair is not critical in the context of this invention, only that selection of the fluorophore/quencher pairs ensures masking of the fluorophore. Upon activation of the effector proteins disclosed herein, the RNA oligonucleotide is cleaved thereby severing the proximity between the fluorophore and quencher needed to maintain the contact quenching effect. Accordingly, detection of the fluorophore may be used to determine the presence of a target molecule in a sample.

[1019] In one example embodiment, the masking construct may comprise a quantum dot. The quantum dot may have multiple linker molecules attached to the surface. At least a portion of the linker molecule comprises RNA. The linker molecule is attached to the quantum dot at one end and to one or more quenchers along the length or at terminal ends of the linker such that the quenchers are maintained in sufficient proximity for quenching of the quantum dot to occur. The linker may be branched. As above, the quantum dot/quencher pair is not critical, only that selection of the quantum dot/quencher pair ensures masking of the fluorophore. Quantum dots and their cognate quenchers are known in the art and can be selected for this purpose by one having ordinary skill in the art. Upon activation of the effector proteins disclosed herein, the RNA portion of the linker molecule is cleaved thereby eliminating the proximity between the quantum dot and one or more quenchers needed to maintain the quenching effect. In one embodiment, the quantum dot is streptavidin conjugated, such as Qdot® 625 Streptavidin Conjugate (www.thermofisher.com/order/catalog/product/A10196). RNA are attached via biotin linkers and recruit quenching molecules, with the sequence/5Biosg/UCUCGUACGUUC/3IAbRQSp/ (SEQ ID No. 30) or/5Biosg/UCUCGUACGUUCUCUCGUACGUUC/3IAbRQSp/ (SEQ ID No. 31) where/5Biosg/is a biotin tag and/3IAbRQSp/ is an Iowa black quencher. Upon cleavage, the quencher will be released and the quantum dot will fluoresce visibly.

[1020] In a similar fashion, fluorescence energy transfer (FRET) may be used to generate a detectable positive signal. FRET is a non-radiative process by which a photon from an energetically excited fluorophore (i.e. “donor fluorophore”) raises the energy state of an electron in another molecule (i.e. “the acceptor”) to higher vibrational levels of the excited singlet state. The donor fluorophore returns to the ground state without emitting a fluoresce characteristic of that fluorophore. The acceptor can be another fluorophore or non-fluorescent molecule. If the acceptor is a fluorophore, the transferred energy is emitted as fluorescence characteristic of that fluorophore. If the acceptor is a non-fluorescent molecule the absorbed energy is loss as heat. Thus, in the context of the embodiments disclosed herein, the fluorophore/quencher pair is replaced with a donor fluorophore/acceptor pair attached to the oligonucleotide molecule. When intact, the masking construct generates a first signal (negative detectable signal) as detected by the fluorescence or heat emitted from the acceptor. Upon activation of the effector proteins disclosed herein the RNA oligonucleotide is cleaved and FRET is disrupted such that fluorescence of the donor fluorophore is now detected (positive detectable signal).

[1021] One mode of colorimetric readout for the detection of RNAses is based upon intercalating dyes, which change their absorbance in response to cleavage of long RNAs to short nucleotides. Several existing dyes with these properties exist. From Wagner (1983), Pyronine-Y will complex with RNA and form a complex that has an absorbance at 572 nm; cleavage of RNA results in loss of absorbance and a color change. Greiner-Stoeffele (1996) used methylene blue in a similar fashion, with changes in absorbance at 688 nm upon RNAse activity.

[1022] Another mode of colorimetric readout involves nucleic acid substrates that change color upon cleavage. Witmer (1991) utilized a synthetic ribonucleotide substrate, U-3′-BCIP, that releases a reporter group after cleavage, resulting in generation of absorbance at 650 nm.

[1023] With respect to general information on CRISPR-Cas Systems, components thereof, and delivery of such components, including methods, materials, delivery vehicles, vectors, particles, AAV, and making and using thereof, including as to amounts and formulations, all useful in the practice of the instant invention, reference is made to: U.S. Pat. Nos. 8,999,641, 8,993,233, 8,945,839, 8,932,814, 8,906,616, 8,895,308, 8,889,418, 8,889,356, 8,871,445, 8,865,406, 8,795,965, 8,771,945 and 8,697,359; US Patent Publications US 2014-0310830 (U.S. application Ser. No. 14/105,031), US 2014-0287938 A1 (U.S. application Ser. No. 14/213,991), US 2014-0273234 A1 (U.S. application Ser. No. 14/293,674), US2014-0273232 A1 (U.S. application Ser. No. 14/290,575), US 2014-0273231 (U.S. application Ser. No. 14/259,420), US 2014-0256046 A1 (U.S. application Ser. No. 14/226,274), US 2014-0248702 A1 (U.S. application Ser. No. 14/258,458), US 2014-0242700 A1 (U.S. application Ser. No. 14/222,930), US 2014-0242699 A1 (U.S. application Ser. No. 14/183,512), US 2014-0242664 A1 (U.S. application Ser. No. 14/104,990), US 2014-0234972 A1 (U.S. application Ser. No. 14/183,471), US 2014-0227787 A1 (U.S. application Ser. No. 14/256,912), US 2014-0189896 A1 (U.S. application Ser. No. 14/105,035), US 2014-0186958 (U.S. application Ser. No. 14/105,017), US 2014-0186919 A1 (U.S. application Ser. No. 14/104,977), US 2014-0186843 A1 (U.S. application Ser. No. 14/104,900), US 2014-0179770 A1 (U.S. application Ser. No. 14/104,837) and US 2014-0179006 A1 (U.S. application Ser. No. 14/183,486), US 2014-0170753 (U.S. application Ser. No. 14/183,429); European Patents EP 2 784 162 B1 and EP 2 771 468 B1; European Patent Applications EP 2 771 468 (EP13818570.7), EP 2 764 103 (EP13824232.6), and EP 2 784 162 (EP14170383.5); and PCT Patent Publications PCT Patent Publications WO 2014/093661 (PCT/US2013/074743), WO 2014/093694 (PCT/US2013/074790), WO 2014/093595 (PCT/US2013/074611), WO 2014/093718 (PCT/US2013/074825), WO 2014/093709 (PCT/US2013/074812), WO 2014/093622 (PCT/US2013/074667), WO 2014/093635 (PCT/US2013/074691), WO 2014/093655 (PCT/US2013/074736), WO 2014/093712 (PCT/US2013/074819), WO 2014/093701 (PCT/US2013/074800), WO 2014/018423 (PCT/US2013/051418), WO 2014/204723 (PCT/US2014/041790), WO 2014/204724 (PCT/US2014/041800), WO 2014/204725 (PCT/US2014/041803), WO 2014/204726 (PCT/US2014/041804), WO 2014/204727 (PCT/US2014/041806), WO 2014/204728 (PCT/US2014/041808), WO 2014/204729 (PCT/US2014/041809). Reference is also made to U.S. provisional patent applications 61/758,468; 61/802,174; 61/806,375; 61/814,263; 61/819,803 and 61/828,130, filed on Jan. 30, 2013; Mar. 15, 2013; Mar. 28, 2013; Apr. 20, 2013; May 6, 2013 and May 28, 2013 respectively. Reference is also made to U.S. provisional patent application 61/836,123, filed on Jun. 17, 2013. Reference is additionally made to U.S. provisional patent applications 61/835,931, 61/835,936, 61/836,127, 61/836,101, 61/836,080 and 61/835,973, each filed Jun. 17, 2013. Further reference is made to U.S. provisional patent applications 61/862,468 and 61/862,355 filed on Aug. 5, 2013; 61/871,301 filed on Aug. 28, 2013; 61/960,777 filed on Sep. 25, 2013 and 61/961,980 filed on Oct. 28, 2013. Reference is yet further made to: PCT Patent applications Nos: PCT/US2014/041803, PCT/US2014/041800, PCT/US2014/041809, PCT/US2014/041804 and PCT/US2014/041806, each filed Jun. 10, 2014 Jun. 10, 2014; PCT/US2014/041808 filed Jun. 11, 2014; and PCT/US2014/62558 filed Oct. 28, 2014, and U.S. Provisional Patent Applications Ser. Nos. 61/915,150, 61/915,301, 61/915,267 and 61/915,260, each filed Dec. 12, 2013; 61/757,972 and 61/768,959, filed on Jan. 29, 2013 and Feb. 25, 2013; 61/835,936, 61/836,127, 61/836,101, 61/836,080, 61/835,973, and 61/835,931, filed Jun. 17, 2013; 62/010,888 and 62/010,879, both filed Jun. 11, 2014; 62/010,329 and 62/010,441, each filed Jun. 10, 2014; 61/939,228 and 61/939,242, each filed Feb. 12, 2014; 61/980,012, filed April 15,2014; 62/038,358, filed Aug. 17, 2014; 62/054,490, 62/055,484, 62/055,460 and 62/055,487, each filed Sep. 25, 2014; and 62/069,243, filed Oct. 27, 2014. Reference is also made to U.S. provisional patent applications Nos. 62/055,484, 62/055,460, and 62/055,487, filed Sep. 25, 2014; U.S. provisional patent application 61/980,012, filed Apr. 15, 2014; and U.S. provisional patent application 61/939,242 filed Feb. 12, 2014. Reference is made to PCT application designating, inter alia, the United States, application No. PCT/US14/41806, filed Jun. 10, 2014. Reference is made to U.S. provisional patent application 61/930,214 filed on Jan. 22, 2014. Reference is made to U.S. provisional patent applications 61/915,251; 61/915,260 and 61/915,267, each filed on Dec. 12, 2013. Reference is made to US provisional patent application U.S. Ser. No. 61/980,012 filed Apr. 15, 2014. Reference is made to PCT application designating, inter alia, the United States, application No. PCT/US14/41806, filed Jun. 10, 2014. Reference is made to U.S. provisional patent application 61/930,214 filed on Jan. 22, 2014. Reference is made to U.S. provisional patent applications 61/915,251; 61/915,260 and 61/915,267, each filed on Dec. 12, 2013.

[1024] Mention is also made of U.S. application 62/091,455, filed, 12 Dec. 2014, PROTECTED GUIDE RNAS (PGRNAS); U.S. application 62/096,708, 24 Dec. 2014, PROTECTED GUIDE RNAS (PGRNAS); U.S. application 62/091,462, 12 Dec. 2014, DEAD GUIDES FOR CRISPR TRANSCRIPTION FACTORS; U.S. application 62/096,324, 23 Dec. 2014, DEAD GUIDES FOR CRISPR TRANSCRIPTION FACTORS; U.S. application 62/091,456, 12 Dec. 2014, ESCORTED AND FUNCTIONALIZED GUIDES FOR CRISPR-CAS SYSTEMS; U.S. application 62/091,461, 12 Dec. 2014, DELIVERY, USE AND THERAPEUTIC APPLICATIONS OF THE CRISPR-CAS SYSTEMS AND COMPOSITIONS FOR GENOME EDITING AS TO HEMATOPOETIC STEM CELLS (HSCs); U.S. application 62/094,903, 19 Dec. 2014, UNBIASED IDENTIFICATION OF DOUBLE-STRAND BREAKS AND GENOMIC REARRANGEMENT BY GENOME-WISE INSERT CAPTURE SEQUENCING; U.S. application 62/096,761, 24 Dec. 2014, ENGINEERING OF SYSTEMS, METHODS AND OPTIMIZED ENZYME AND GUIDE SCAFFOLDS FOR SEQUENCE MANIPULATION; U.S. application 62/098,059, 30 Dec. 2014, RNA-TARGETING SYSTEM; U.S. application 62/096,656, 24 Dec. 2014, CRISPR HAVING OR ASSOCIATED WITH DESTABILIZATION DOMAINS; U.S. application 62/096,697, 24 Dec. 20, 2014, CRISPR HAVING OR ASSOCIATED WITH AAV; U.S. application 62/098,158, 30 Dec. 2014, ENGINEERED CRISPR COMPLEX INSERTIONAL TARGETING SYSTEMS; U.S. application 62/151,052, 22 Apr. 2015, CELLULAR TARGETING FOR EXTRACELLULAR EXOSOMAL REPORTING; U.S. application 62/054,490, 24 Sep. 2014, DELIVERY, USE AND THERAPEUTIC APPLICATIONS OF THE CRISPR-CAS SYSTEMS AND COMPOSITIONS FOR TARGETING DISORDERS AND DISEASES USING PARTICLE DELIVERY COMPONENTS; U.S. application 62/055,484, 25 Sep. 2014, SYSTEMS, METHODS AND COMPOSITIONS FOR SEQUENCE MANIPULATION WITH OPTIMIZED FUNCTIONAL CRISPR-CAS SYSTEMS; U.S. application 62/087,537, 4 Dec. 2014, SYSTEMS, METHODS AND COMPOSITIONS FOR SEQUENCE MANIPULATION WITH OPTIMIZED FUNCTIONAL CRISPR-CAS SYSTEMS; U.S. application 62/054,651, 24 Sep. 2014, DELIVERY, USE AND THERAPEUTIC APPLICATIONS OF THE CRISPR-CAS SYSTEMS AND COMPOSITIONS FOR MODELING COMPETITION OF MULTIPLE CANCER MUTATIONS IN VIVO; U.S. application 62/067,886, 23 Oct. 2014, DELIVERY, USE AND THERAPEUTIC APPLICATIONS OF THE CRISPR-CAS SYSTEMS AND COMPOSITIONS FOR MODELING COMPETITION OF MULTIPLE CANCER MUTATIONS IN VIVO; U.S. application 62/054,675, 24 Sep. 2014, DELIVERY, USE AND THERAPEUTIC APPLICATIONS OF THE CRISPR-CAS SYSTEMS AND COMPOSITIONS IN NEURONAL CELLS/TISSUES; U.S. application 62/054,528, 24 Sep. 2014, DELIVERY, USE AND THERAPEUTIC APPLICATIONS OF THE CRISPR-CAS SYSTEMS AND COMPOSITIONS IN IMMUNE DISEASES OR DISORDERS; U.S. application 62/055,454, 25 Sep. 2014, DELIVERY, USE AND THERAPEUTIC APPLICATIONS OF THE CRISPR-CAS SYSTEMS AND COMPOSITIONS FOR TARGETING DISORDERS AND DISEASES USING CELL PENETRATION PEPTIDES (CPP); U.S. application 62/055,460, 25 Sep. 2014, MULTIFUNCTIONAL-CRISPR COMPLEXES AND/OR OPTIMIZED ENZYME LINKED FUNCTIONAL-CRISPR COMPLEXES; U.S. application 62/087,475, 4 Dec. 2014, FUNCTIONAL SCREENING WITH OPTIMIZED FUNCTIONAL CRISPR-CAS SYSTEMS; U.S. application 62/055,487, 25 Sep. 2014, FUNCTIONAL SCREENING WITH OPTIMIZED FUNCTIONAL CRISPR-CAS SYSTEMS; U.S. application 62/087,546, 4 Dec. 2014, MULTIFUNCTIONAL CRISPR COMPLEXES AND/OR OPTIMIZED ENZYME LINKED FUNCTIONAL-CRISPR COMPLEXES; and U.S. application 62/098,285, 30 Dec. 2014, CRISPR MEDIATED IN VIVO MODELING AND GENETIC SCREENING OF TUMOR GROWTH AND METASTASIS.

[1025] Each of these patents, patent publications, and applications, and all documents cited therein or during their prosecution (“appln cited documents”) and all documents cited or referenced in the appln cited documents, together with any instructions, descriptions, product specifications, and product sheets for any products mentioned therein or in any document therein and incorporated by reference herein, are hereby incorporated herein by reference, and may be employed in the practice of the invention. All documents (e.g., these patents, patent publications and applications and the appln cited documents) are incorporated herein by reference to the same extent as if each individual document was specifically and individually indicated to be incorporated by reference.

[1026] Also with respect to general information on CRISPR-Cas Systems, mention is made of the following (also hereby incorporated herein by reference):
[1027] Multiplex genome engineering using CRISPR/Cas systems. Cong, L., Ran, F. A., Cox, D., Lin, S., Barretto, R., Habib, N., Hsu, P. D., Wu, X., Jiang, W., Marraffini, L. A., & Zhang, F. Science February 15; 339(6121):819-23 (2013);
[1028] RNA-guided editing of bacterial genomes using CRISPR-Cas systems. Jiang W., Bikard D., Cox D., Zhang F, Marraffini L A. Nat Biotechnol March; 31(3):233-9 (2013);
[1029] One-Step Generation of Mice Carrying Mutations in Multiple Genes by CRISPR/Cas-Mediated Genome Engineering. Wang H., Yang H., Shivalila C S., Dawlaty M M., Cheng A W., Zhang F., Jaenisch R. Cell May 9; 153(4):910-8 (2013);
[1030] Optical control of mammalian endogenous transcription and epigenetic states. Konermann S, Brigham M D, Trevino A E, Hsu P D, Heidenreich M, Cong L, Platt R J, Scott D A, Church G M, Zhang F. Nature. August 22; 500(7463):472-6. doi: 10.1038/Nature12466. Epub 2013 Aug. 23 (2013);
[1031] Double Nicking by RNA-Guided CRISPR Cas9 for Enhanced Genome Editing Specificity. Ran, F A., Hsu, P D., Lin, C Y., Gootenberg, J S., Konermann, S., Trevino, A E., Scott, D A., Inoue, A., Matoba, S., Zhang, Y., & Zhang, F. Cell August 28. pii: S0092-8674(13)01015-5 (2013-A);
[1032] DNA targeting specificity of RNA-guided Cas9 nucleases. Hsu, P., Scott, D., Weinstein, J., Ran, F A., Konermann, S., Agarwala, V., Li, Y., Fine, E., Wu, X., Shalem, O., Cradick, T J., Marraffini, L A., Bao, G., & Zhang, F. Nat Biotechnol doi:10.1038/nbt.2647 (2013);
[1033] Genome engineering using the CRISPR-Cas9 system. Ran, F A., Hsu, P D., Wright, J., Agarwala, V., Scott, D A., Zhang, F. Nature Protocols November; 8(11):2281-308 (2013-B);
[1034] Genome-Scale CRISPR-Cas9 Knockout Screening in Human Cells. Shalem, O., Sanjana, N E., Hartenian, E., Shi, X., Scott, D A., Mikkelson, T., Heckl, D., Ebert, B L., Root, D E., Doench, J G., Zhang, F. Science December 12. (2013). [Epub ahead of print];
[1035] Crystal structure of cas9 in complex with guide RNA and target DNA. Nishimasu, H., Ran, F A., Hsu, P D., Konermann, S., Shehata, S I., Dohmae, N., Ishitani, R., Zhang, F., Nureki, O. Cell February 27, 156(5):935-49 (2014);
[1036] Genome-wide binding of the CRISPR endonuclease Cas9 in mammalian cells. Wu X., Scott D A., Kriz A J., Chiu A C., Hsu P D., Dadon D B., Cheng A W., Trevino A E., Konermann S., Chen S., Jaenisch R., Zhang F., Sharp P A. Nat Biotechnol. April 20. doi: 10.1038/nbt.2889 (2014);
[1037] CRISPR-Cas9 Knockin Mice for Genome Editing and Cancer Modeling. Platt R J, Chen S, Zhou Y, Yim M J, Swiech L, Kempton H R, Dahlman J E, Parnas O, Eisenhaure T M, Jovanovic M, Graham D B, Jhunjhunwala S, Heidenreich M, Xavier R J, Langer R, Anderson D G, Hacohen N, Regev A, Feng G, Sharp P A, Zhang F. Cell 159(2): 440-455 DOI: 10.1016/j.cell.2014.09.014(2014);
[1038] Development and Applications of CRISPR-Cas9 for Genome Engineering, Hsu P D, Lander E S, Zhang F., Cell. June 5; 157(6):1262-78 (2014).
[1039] Genetic screens in human cells using the CRISPR/Cas9 system, Wang T, Wei J J, Sabatini D M, Lander E S., Science. January 3; 343(6166): 80-84. doi:10.1126/science.1246981 (2014);
[1040] Rational design of highly active sgRNAs for CRISPR-Cas9-mediated gene inactivation, Doench J G, Hartenian E, Graham D B, Tothova Z, Hegde M, Smith I, Sullender M, Ebert B L, Xavier R J, Root D E., (published online 3 Sep. 2014) Nat Biotechnol. December; 32(12):1262-7 (2014);
[1041] In vivo interrogation of gene function in the mammalian brain using CRISPR-Cas9, Swiech L, Heidenreich M, Banerjee A, Habib N, Li Y, Trombetta J, Sur M, Zhang F., (published online 19 Oct. 2014) Nat Biotechnol. January; 33(1):102-6 (2015);
[1042] Genome-scale transcriptional activation by an engineered CRISPR-Cas9 complex, Konermann S, Brigham M D, Trevino A E, Joung J, Abudayyeh O O, Barcena C, Hsu P D, Habib N, Gootenberg J S, Nishimasu H, Nureki O, Zhang F., Nature. January 29; 517(7536):583-8 (2015).
[1043] A split-Cas9 architecture for inducible genome editing and transcription modulation, Zetsche B, Volz S E, Zhang F., (published online 2 Feb. 2015) Nat Biotechnol. February; 33(2):139-42 (2015);
[1044] Genome-wide CRISPR Screen in a Mouse Model of Tumor Growth and Metastasis, Chen S, Sanjana N E, Zheng K, Shalem O, Lee K, Shi X, Scott D A, Song J, Pan J Q, Weissleder R, Lee H, Zhang F, Sharp P A. Cell 160, 1246-1260, Mar. 12, 2015 (multiplex screen in mouse), and
[1045] In vivo genome editing using Staphylococcus aureus Cas9, Ran F A, Cong L, Yan W X, Scott D A, Gootenberg J S, Kriz A J, Zetsche B, Shalem O, Wu X, Makarova K S, Koonin E V, Sharp P A, Zhang F., (published online 1 Apr. 2015), Nature. April 9; 520(7546):186-91 (2015).
[1046] Shalem et al., “High-throughput functional genomics using CRISPR-Cas9,” Nature Reviews Genetics 16, 299-311 (May 2015).
[1047] Xu et al., “Sequence determinants of improved CRISPR sgRNA design,” Genome Research 25, 1147-1157 (August 2015).
[1048] Parnas et al., “A Genome-wide CRISPR Screen in Primary Immune Cells to Dissect Regulatory Networks,” Cell 162, 675-686 (Jul. 30, 2015).
[1049] Ramanan et al., CRISPR/Cas9 cleavage of viral DNA efficiently suppresses hepatitis B virus,” Scientific Reports 5:10833. doi: 10.1038/srep10833 (Jun. 2, 2015)
[1050] Nishimasu et al., “Crystal Structure of Staphylococcus aureus Cas9,” Cell 162, 1113-1126 (Aug. 27, 2015)
[1051] Zetsche et al. (2015), “Cpf1 is a single RNA-guided endonuclease of a class 2 CRISPR-Cas system,” Cell 163, 759-771 (Oct. 22, 2015) doi: 10.1016/j.cell.2015.09.038. Epub Sep. 25, 2015
[1052] Shmakov et al. (2015), “Discovery and Functional Characterization of Diverse Class 2 CRISPR-Cas Systems,” Molecular Cell 60, 385-397 (Nov. 5, 2015) doi: 10.1016/j.molce1.2015.10.008. Epub Oct. 22, 2015
[1053] Dahlman et al., “Orthogonal gene control with a catalytically active Cas9 nuclease,” Nature Biotechnology 33, 1159-1161 (November, 2015)
[1054] Gao et al, “Engineered Cpf1 Enzymes with Altered PAM Specificities,” bioRxiv 091611; doi: dx.doi.org/10.1101/091611 Epub Dec. 4, 2016
[1055] Smargon et al. (2017), “Cas13b Is a Type V I-B CRISPR-Associated RNA-Guided RNase Differentially Regulated by Accessory Proteins Csx27 and Csx28,” Molecular Cell 65, 618-630 (Feb. 16, 2017) doi: 10.1016/j.molce1.2016.12.023. Epub Jan. 5, 2017
   each of which is incorporated herein by reference, may be considered in the practice of the instant invention, and discussed briefly below:
[1056] Cong et al. engineered type II CRISPR-Cas systems for use in eukaryotic cells based on both Streptococcus thermophilus Cas9 and also Streptococcus pyogenes Cas9 and demonstrated that Cas9 nucleases can be directed by short RNAs to induce precise cleavage of DNA in human and mouse cells. Their study further showed that Cas9 as converted into a nicking enzyme can be used to facilitate homology-directed repair in eukaryotic cells with minimal mutagenic activity. Additionally, their study demonstrated that multiple guide sequences can be encoded into a single CRISPR array to enable simultaneous editing of several at endogenous genomic loci sites within the mammalian genome, demonstrating easy programmability and wide applicability of the RNA-guided nuclease technology. This ability to use RNA to program sequence specific DNA cleavage in cells defined a new class of genome engineering tools. These studies further showed that other CRISPR loci are likely to be transplantable into mammalian cells and can also mediate mammalian genome cleavage. Importantly, it can be envisaged that several aspects of the CRISPR-Cas system can be further improved to increase its efficiency and versatility.
[1057] Jiang et al. used the clustered, regularly interspaced, short palindromic repeats (CRISPR)-associated Cas9 endonuclease complexed with dual-RNAs to introduce precise mutations in the genomes of Streptococcus pneumoniae and Escherichia coli. The approach relied on dual-RNA:Cas9-directed cleavage at the targeted genomic site to kill unmutated cells and circumvents the need for selectable markers or counter-selection systems. The study reported reprogramming dual-RNA:Cas9 specificity by changing the sequence of short CRISPR RNA (crRNA) to make single- and multinucleotide changes carried on editing templates. The study showed that simultaneous use of two crRNAs enabled multiplex mutagenesis. Furthermore, when the approach was used in combination with recombineering, in S. pneumoniae, nearly 100% of cells that were recovered using the described approach contained the desired mutation, and in E. coli, 65% that were recovered contained the mutation.
[1058] Wang et al. (2013) used the CRISPR/Cas system for the one-step generation of mice carrying mutations in multiple genes which were traditionally generated in multiple steps by sequential recombination in embryonic stem cells and/or time-consuming intercrossing of mice with a single mutation. The CRISPR/Cas system will greatly accelerate the in vivo study of functionally redundant genes and of epistatic gene interactions.
[1059] Konermann et al. (2013) addressed the need in the art for versatile and robust technologies that enable optical and chemical modulation of DNA-binding domains based CRISPR Cas9 enzyme and also Transcriptional Activator Like Effectors
[1060] Ran et al. (2013-A) described an approach that combined a Cas9 nickase mutant with paired guide RNAs to introduce targeted double-strand breaks. This addresses the issue of the Cas9 nuclease from the microbial CRISPR-Cas system being targeted to specific genomic loci by a guide sequence, which can tolerate certain mismatches to the DNA target and thereby promote undesired off-target mutagenesis. Because individual nicks in the genome are repaired with high fidelity, simultaneous nicking via appropriately offset guide RNAs is required for double-stranded breaks and extends the number of specifically recognized bases for target cleavage. The authors demonstrated that using paired nicking can reduce off-target activity by 50- to 1,500-fold in cell lines and to facilitate gene knockout in mouse zygotes without sacrificing on-target cleavage efficiency. This versatile strategy enables a wide variety of genome editing applications that require high specificity.
[1061] Hsu et al. (2013) characterized SpCas9 targeting specificity in human cells to inform the selection of target sites and avoid off-target effects. The study evaluated >700 guide RNA variants and SpCas9-induced indel mutation levels at >100 predicted genomic off-target loci in 293T and 293F T cells. The authors that SpCas9 tolerates mismatches between guide RNA and target DNA at different positions in a sequence-dependent manner, sensitive to the number, position and distribution of mismatches. The authors further showed that SpCas9-mediated cleavage is unaffected by DNA methylation and that the dosage of SpCas9 and sgRNA can be titrated to minimize off-target modification. Additionally, to facilitate mammalian genome engineering applications, the authors reported providing a web-based software tool to guide the selection and validation of target sequences as well as off-target analyses.
[1062] Ran et al. (2013-B) described a set of tools for Cas9-mediated genome editing via non-homologous end joining (NHEJ) or homology-directed repair (HDR) in mammalian cells, as well as generation of modified cell lines for downstream functional studies. To minimize off-target cleavage, the authors further described a double-nicking strategy using the Cas9 nickase mutant with paired guide RNAs. The protocol provided by the authors experimentally derived guidelines for the selection of target sites, evaluation of cleavage efficiency and analysis of off-target activity. The studies showed that beginning with target design, gene modifications can be achieved within as little as 1-2 weeks, and modified clonal cell lines can be derived within 2-3 weeks.
[1063] Shalem et al. described a new way to interrogate gene function on a genome-wide scale. Their studies showed that delivery of a genome-scale CRISPR-Cas9 knockout (GeCKO) library targeted 18,080 genes with 64,751 unique guide sequences enabled both negative and positive selection screening in human cells. First, the authors showed use of the GeCKO library to identify genes essential for cell viability in cancer and pluripotent stem cells. Next, in a melanoma model, the authors screened for genes whose loss is involved in resistance to vemurafenib, a therapeutic that inhibits mutant protein kinase BRAF. Their studies showed that the highest-ranking candidates included previously validated genes NF1 and MED12 as well as novel hits NF2, CUL3, TADA2B, and TADA1. The authors observed a high level of consistency between independent guide RNAs targeting the same gene and a high rate of hit confirmation, and thus demonstrated the promise of genome-scale screening with Cas9.
[1064] Nishimasu et al. reported the crystal structure of Streptococcus pyogenes Cas9 in complex with sgRNA and its target DNA at 2.5 A° resolution. The structure revealed a bilobed architecture composed of target recognition and nuclease lobes, accommodating the sgRNA:DNA heteroduplex in a positively charged groove at their interface. Whereas the recognition lobe is essential for binding sgRNA and DNA, the nuclease lobe contains the HNH and RuvC nuclease domains, which are properly positioned for cleavage of the complementary and non-complementary strands of the target DNA, respectively. The nuclease lobe also contains a carboxyl-terminal domain responsible for the interaction with the protospacer adjacent motif (PAM). This high-resolution structure and accompanying functional analyses have revealed the molecular mechanism of RNA-guided DNA targeting by Cas9, thus paving the way for the rational design of new, versatile genome-editing technologies.
[1065] Wu et al. mapped genome-wide binding sites of a catalytically inactive Cas9 (dCas9) from Streptococcus pyogenes loaded with single guide RNAs (sgRNAs) in mouse embryonic stem cells (mESCs). The authors showed that each of the four sgRNAs tested targets dCas9 to between tens and thousands of genomic sites, frequently characterized by a 5-nucleotide seed region in the sgRNA and an NGG protospacer adjacent motif (PAM). Chromatin inaccessibility decreases dCas9 binding to other sites with matching seed sequences; thus 70% of off-target sites are associated with genes. The authors showed that targeted sequencing of 295 dCas9 binding sites in mESCs transfected with catalytically active Cas9 identified only one site mutated above background levels. The authors proposed a two-state model for Cas9 binding and cleavage, in which a seed match triggers binding but extensive pairing with target DNA is required for cleavage.
[1066] Platt et al. established a Cre-dependent Cas9 knockin mouse. The authors demonstrated in vivo as well as ex vivo genome editing using adeno-associated virus (AAV)-, lentivirus-, or particle-mediated delivery of guide RNA in neurons, immune cells, and endothelial cells.
[1067] Hsu et al. (2014) is a review article that discusses generally CRISPR-Cas9 history from yogurt to genome editing, including genetic screening of cells.
[1068] Wang et al. (2014) relates to a pooled, loss-of-function genetic screening approach suitable for both positive and negative selection that uses a genome-scale lentiviral single guide RNA (sgRNA) library.
[1069] Doench et al. created a pool of sgRNAs, tiling across all possible target sites of a panel of six endogenous mouse and three endogenous human genes and quantitatively assessed their ability to produce null alleles of their target gene by antibody staining and flow cytometry. The authors showed that optimization of the PAM improved activity and also provided an on-line tool for designing sgRNAs.
[1070] Swiech et al. demonstrate that AAV-mediated SpCas9 genome editing can enable reverse genetic studies of gene function in the brain.
[1071] Konermann et al. (2015) discusses the ability to attach multiple effector domains, e.g., transcriptional activator, functional and epigenomic regulators at appropriate positions on the guide such as stem or tetraloop with and without linkers.
[1072] Zetsche et al. demonstrates that the Cas9 enzyme can be split into two and hence the assembly of Cas9 for activation can be controlled.
[1073] Chen et al. relates to multiplex screening by demonstrating that a genome-wide in vivo CRISPR-Cas9 screen in mice reveals genes regulating lung metastasis.
[1074] Ran et al. (2015) relates to SaCas9 and its ability to edit genomes and demonstrates that one cannot extrapolate from biochemical assays. Shalem et al. (2015) described ways in which catalytically inactive Cas9 (dCas9) fusions are used to synthetically repress (CRISPRi) or activate (CRISPRa) expression, showing. advances using Cas9 for genome-scale screens, including arrayed and pooled screens, knockout approaches that inactivate genomic loci and strategies that modulate transcriptional activity.
[1075] Shalem et al. (2015) described ways in which catalytically inactive Cas9 (dCas9) fusions are used to synthetically repress (CRISPRi) or activate (CRISPRa) expression, showing. advances using Cas9 for genome-scale screens, including arrayed and pooled screens, knockout approaches that inactivate genomic loci and strategies that modulate transcriptional activity.
[1076] Xu et al. (2015) assessed the DNA sequence features that contribute to single guide RNA (sgRNA) efficiency in CRISPR-based screens. The authors explored efficiency of CRISPR/Cas9 knockout and nucleotide preference at the cleavage site. The authors also found that the sequence preference for CRISPRi/a is substantially different from that for CRISPR/Cas9 knockout.
[1077] Parnas et al. (2015) introduced genome-wide pooled CRISPR-Cas9 libraries into dendritic cells (DCs) to identify genes that control the induction of tumor necrosis factor (Tnf) by bacterial lipopolysaccharide (LPS). Known regulators of Tlr4 signaling and previously unknown candidates were identified and classified into three functional modules with distinct effects on the canonical responses to LPS.
[1078] Ramanan et al (2015) demonstrated cleavage of viral episomal DNA (cccDNA) in infected cells. The HBV genome exists in the nuclei of infected hepatocytes as a 3.2 kb double-stranded episomal DNA species called covalently closed circular DNA (cccDNA), which is a key component in the HBV life cycle whose replication is not inhibited by current therapies. The authors showed that sgRNAs specifically targeting highly conserved regions of HBV robustly suppresses viral replication and depleted cccDNA.
[1079] Nishimasu et al. (2015) reported the crystal structures of SaCas9 in complex with a single guide RNA (sgRNA) and its double-stranded DNA targets, containing the 5′-TTGAAT-3′ PAM and the 5′-TTGGGT-3′ PAM. A structural comparison of SaCas9 with SpCas9 highlighted both structural conservation and divergence, explaining their distinct PAM specificities and orthologous sgRNA recognition.
[1080] Zetsche et al. (2015) reported the characterization of Cpf1, a putative class 2 CRISPR effector. It was demonstrated that Cpf1 mediates robust DNA interference with features distinct from Cas9. Identifying this mechanism of interference broadens our understanding of CRISPR-Cas systems and advances their genome editing applications.
[1081] Shmakov et al. (2015) reported the characterization of three distinct Class 2 CRISPR-Cas systems. The effectors of two of the identified systems, C2c1 and C2c3, contain RuvC like endonuclease domains distantly related to Cpf1. The third system, Cas13c, contains an effector with two predicted HEPN RNase domains.
[1082] Gao et al. (2016) reported using a structure-guided saturation mutagenesis screen to increase the targeting range of Cpf1. AsCpf1 variants were engineered with the mutations S542R/K607R and S542R/K548V/N552R that can cleave target sites with TYCV/CCCC and TATV PAMs, respectively, with enhanced activities in vitro and in human cells.

[1083] Also, “Dimeric CRISPR RNA-guided Fok1 nucleases for highly specific genome editing”, Shengdar Q. Tsai, Nicolas Wyvekens, Cyd Khayter, Jennifer A. Foden, Vishal Thapar, Deepak Reyon, Mathew J. Goodwin, Martin J. Aryee, J. Keith Joung Nature Biotechnology 32(6): 569-77 (2014), relates to dimeric RNA-guided Fold Nucleases that recognize extended sequences and can edit endogenous genes with high efficiencies in human cells.

[1084] In addition, mention is made of PCT application PCT/US14/70057, Attorney Reference 47627.99.2060 and BI-2013/107 entitled “DELIVERY, USE AND THERAPEUTIC APPLICATIONS OF THE CRISPR-CAS SYSTEMS AND COMPOSITIONS FOR TARGETING DISORDERS AND DISEASES USING PARTICLE DELIVERY COMPONENTS (claiming priority from one or more or all of U S provisional patent applications: 62/054,490, filed Sep. 24, 2014; 62/010,441, filed Jun. 10, 2014; and 61/915,118, 61/915,215 and 61/915,148, each filed on Dec. 12, 2013) (“the Particle Delivery PCT”), incorporated herein by reference, with respect to a method of preparing an sgRNA-and-Cas9 protein containing particle comprising admixing a mixture comprising an sgRNA and Cas9 protein (and optionally HDR template) with a mixture comprising or consisting essentially of or consisting of surfactant, phospholipid, biodegradable polymer, lipoprotein and alcohol; and particles from such a process. For example, wherein Cas9 protein and sgRNA were mixed together at a suitable, e.g., 3:1 to 1:3 or 2:1 to 1:2 or 1:1 molar ratio, at a suitable temperature, e.g., 15-30C, e.g., 20-25C, e.g., room temperature, for a suitable time, e.g., 15-45, such as 30 minutes, advantageously in sterile, nuclease free buffer, e.g., 1×PBS. Separately, particle components such as or comprising: a surfactant, e.g., cationic lipid, e.g., 1,2-dioleoyl-3-trimethylammonium-propane (DOTAP); phospholipid, e.g., dimyristoylphosphatidylcholine (DMPC); biodegradable polymer, such as an ethylene-glycol polymer or PEG, and a lipoprotein, such as a low-density lipoprotein, e.g., cholesterol were dissolved in an alcohol, advantageously a C₁₋₆ alkyl alcohol, such as methanol, ethanol, isopropanol, e.g., 100% ethanol. The two solutions were mixed together to form particles containing the Cas9-sgRNA complexes. Accordingly, sgRNA may be pre-complexed with the Cas9 protein, before formulating the entire complex in a particle. Formulations may be made with a different molar ratio of different components known to promote delivery of nucleic acids into cells (e.g. 1,2-dioleoyl-3-trimethylammonium-propane (DOTAP), 1,2-ditetradecanoyl-sn-glycero-3-phosphocholine (DMPC), polyethylene glycol (PEG), and cholesterol) For example DOTAP:DMPC:PEG:Cholesterol Molar Ratios may be DOTAP 100, DMPC 0, PEG 0, Cholesterol 0; or DOTAP 90, DMPC 0, PEG 10, Cholesterol 0; or DOTAP 90, DMPC 0, PEG 5, Cholesterol 5. DOTAP 100, DMPC 0, PEG 0, Cholesterol 0. That application accordingly comprehends admixing sgRNA, Cas9 protein and components that form a particle; as well as particles from such admixing. Aspects of the instant invention can involve particles; for example, particles using a process analogous to that of the Particle Delivery PCT, e.g., by admixing a mixture comprising sgRNA and/or Cas9 as in the instant invention and components that form a particle, e.g., as in the Particle Delivery PCT, to form a particle and particles from such admixing (or, of course, other particles involving sgRNA and/or Cas9 as in the instant invention).

### EXAMPLES

### Example 1: Expression of Cas13c in Eukaryotic Cells

[1085] The following Cas13c orthologs were codon optimized for expression in mammalian cells. The Cas13c orthologs were expressed for 2 day in mammalian cells and levels of msfGFP were determined in comparison to Cas13a and Cas13b orthologs.

| | |
|---|---|
| Fusobacterium | MEKFRRQNRNSIIKIIISNYDTKGIKELKVRYRKQAQLDTFIIKTEIVNN |
| necrophorum | DIFIKSIIEKAREKYRYSFLFDGEEKYHFKNKSSVEIVKKDIFSQTPDNM |
| subsp. | IRNYKITLKISEKNPRVVEAEIEDLMNSTILKDGRRSARREKSMTERKL |
| funduliforme | IEEKVAKNYSLLANCPMEEVDSIKIYKIKRFLTYRSNMLLYFASINSFL |
| ATCC 51357 | CEGIKGKDNETEEIWHLKDNDVRKEKVRENFKNKLIQSTENYNSSLK |
| contig00003 | NQIEEKEKLLRKEFKKGAFYRTIIKKLQQERIKELSEKSLTEDCEKIIKL |
| (SEQ ID No. | YSKLRHSLMHYDYQYFENLFENKKNDDLMKDLNLDLFKSLPLIRKM |
| 32) | KLNNKVNYLEDGDTLFVLQKTKKAKTLYQIYDALCEQKNGFNKFIND |
| | FFVSDGEENTVFKQIINEKFQSEMEFLEKRISESEKKNEKLKKKLDSMK |
| | AHFRNINSEDTKEAYFWDIHSSRNYKTKYNERKNLVNEYTELLGSSK |
| | EKKLLREEITKINRQLLKLKQEMEEITKKNSLFRLEYKMKIAFGFLFCE |
| | FDGNISKFKDEFDASNQEKIIQYHKNGEKYLTSFLKEEEKEKFNLEKM |
| | QKIIQKTEEEDWLLPETKNNLFKFYLLTYLLLPYELKGDFLGFVKKHY |
| | YDIKNVDFIDENQNNIQVSQTVEKQEDYFYHKIRLFEKNTKKYEIVKY |
| | SIVPNEKLKQYFEDLGIDIKYLTVEQKSEVSEEKNKKVSLKNNGMFNK |
| | TILLFVFKYYQIAFKLFNDIELYSLFFLREKSGKPLEIFRKELESKMKDG |
| | YLNFGQLLYVVYEVLVKNKDLDKILSKKIDYRKDKSFSPEIAYLRNFL |
| | SHLNYSKFLDNFMKINTNKSDENKEVLIPSIKIQKMIQFIEKCNLQNQI |
| | DFDFNFVNDFYMRKEKMFFIQLKQIFPDINSTEKQKMNEKEEILRNRY |
| | HLTDKKNEQIKDEHEAQSQLYEKILSLQKIYSSDKNNFYGRLKEEKLL |
| | FLEKQGKKKLSMEEIKDKIAGDISDLLGILKKEITRDIKDKLTEKFRYC |
| | EEKLLNLSFYNHQDKKKEESIRVFLIRDKNSDNFKFESILDDGSNKIFIS |
| | KNGKEITIQCCDKVLETLIIEKNTLKISSNGKIISLIPHYSYSIDVKY |
| Fusobacterium | MEKFRRQNRSSIIKIIISNYDTKGIKELKVRYRKQAQLDTFIIKTEIVNN |
| necrophorum | DIFIKSIIEKAREKYRYSFLFDGEEKYHFKNKSSVEIVKKDIFSQTPDNM |
| DJ-2 | IRNYKITLKISEKNPRVVEAEIEDLMNSTILKDGRRSARREKSMTERKL |
| contig0065, | IEEKVAENYSLLANCPMEEVDSIKIYKIKRFLTYRSNMLLYFASINSFL |
| whole genome | CEGIKGKDNETEEIWHLKDNDVRKEKVKENFKNKLIQSTENYNSSLK |
| shotgun | NQIEEKEKLLRKESKKGAFYRTIIKKLQQERIKELSEKSLTEDCEKIIKL |
| sequence (SEQ | YSELRHPLMHYDYQYFENLFENKENSELTKNLNLDIFKSLPLVRKMK |
| ID No. 33) | LNNKVNYLEDNDTLFVLQKTKKAKTLYQIYDALCEQKNGFNKFINDF |
| | FVSDGEENTVFKQIINEKFQSEIEFLEKRISESEKKNEKLKKKLDSMKA |
| | HFRNINSEDTKEAYFWDIHSSRNYKTKYNERKNLVNEYTELLGSSKE |
| | KKLLREEITKINRQLLKLKQEMEEITKKNSLFRLEYKMKMAFGFLFCE |
| | FDGNISRFKDEFDASNQEKIIQYHKNGEKYLTYFLKEEEKEKFNLKKL |
| | QETIQKTGEENWLLPQNKNNLFKFYLLTYLLLPYELKGDFLGFVKKH |
| | YYDIKNVDFMDENQSSKIIESKEDDFYHKIRLFEKNTKKYEIVKYSIVP |
| | DKKLKQYFKDLGIDTKYLILDQKSEVSGEKNKKVSLKNNGMFNKTIL |
| | LFVFKYYQIAFKLFNDIELYSLFFLREKSGKPFEVFLKELKDKMIGKQL |
| | NFGQLLYVVYEVLVKNKDLSEILSERIDYRKDMCFSAEIADLRNFLSH |
| | LNYSKFLDNFMKINTNKSDENKEVLIPSIKIQKMIKFIEECNLQSQIDFD |
| | FNFVNDFYMRKEKMFFIQLKQIFPDINSTEKQKMNEKEEILRNRYHLT |
| | DKKNEQIKDEHEAQSQLYEKILSLQKIYSSDKNNFYGRLKEEKLLFLE |
| | KQEKKKLSMEEIKDKIAGDISDLLGILKKEITRDIKDKLTEKFRYCEEK |
| | LLNLSFYNHQDKKKEESIRVFLIRDKNSDNFKFESILDDGSNKIFISKNG |
| | KEITIQCCDKVLETLIIEKNTLKISSNGKIISLIPHYSYSIDVKY |
| Fusobacterium | MKVRYRKQAQLDTFIIKTEIVNNDIFIKSIIEKAREKYRYSFLFDGEEKY |
| necrophorum | HFKNKSSVEIVKNDIFSQTPDNMIRNYKITLKISEKNPRVVEAEIEDLM |
| BFTR-1 | NSTILKDGRRSARREKSMTERKLIEEKVAENYSLLANCPIEEVDSIKIY |
| contig0068 | KIKRFLTYRSNMLLYFASINSFLCEGIKGKDNETEEIWHLKDNDVRKE |
| (SEQ ID No. | KVKENFKNKLIQSTENYNSSLKNQIEEKEKLSSKEFKKGAFYRTIIKKL |
| 34) | QQERIKELSEKSLTEDCEKIIKLYSELRHPLMHYDYQYFENLFENKENS |
| | ELTKNLNLDIFKSLPLVRKMKLNNKVNYLEDNDTLFVLQKTKKAKTL |
| | YQIYDALCEQKNGFNKFINDFFVSDGEENTVFKQIINEKFQSEMEFLEK |
| | RISESEKKNEKLKKKLDSMKAHFRNINSEDTKEAYFWDIHSSRNYKTK |
| | YNERKNLVNEYTKLLGSSKEKKLLREEITKINRQLLKLKQEMEEITKK |
| | NSLFRLEYKMKIAFGFLFCEFDGNISKFKDEFDASNQEKIIQYHKNGEK |
| | YLTSFLKEEEKEKFNLEKMQKIIQKTEEEDWLLPETKNNLFKFYLLTY |
| | LLLPYELKGDFLGFVKKHYYDIKNVDFMDENQNNIQVSQTVEKQEDY |
| | FYHKIRLFEKNTKKYEIVKYSIVPNEKLKQYFEDLGIDIKYLTGSVESG |
| | EKWLGENLGIDIKYLTVEQKSEVSEEKNKKVSLKNNGMFNKTILLFVF |
| | KYYQIAFKLFNDIELYSLFFLREKSEKPFEVFLEELKDKMIGKQLNFGQ |
| | LLYVVYEVLVKNKDLDKILSKKIDYRKDKSFSPEIAYLRNFLSHLNYS |
| | KFLDNFMKINTNKSDENKEVLIPSIKIQKMIQFIEKCNLQNQIDFDFNFV |
| | NDFYMRKEKMFFIQLKQIFPDINSTEKQKKSEKEEILRKRYHLINKKNE |
| | QIKDEHEAQSQLYEKILSLQKIFSCDKNNFYRRLKEEKLLFLEKQGKK |
| | KISMKEIKDKIASDISDLLGILKKEITRDIKDKLTEKFRYCEEKLLNISFY |
| | NHQDKKKEEGIRVFLIRDKNSDNFKFESILDDGSNKIFISKNGKEITIQC |
| | CDKVLETLMIEKNTLKISSNGKIISLIPHYSYSIDVKY |
| Fusobacterium | MTEKKSIIFKNKSSVEIVKKDIFSQTPDNMIRNYKITLKISEKNPRVVEA |
| necrophorum | EIEDLMNSTILKDGRRSARREKSMTERKLIEEKVAENYSLLANCPMEE |
| subsp. | VDSIKIYKIKRFLTYRSNMLLYFASINSFLCEGIKGKDNETEEIWHLKD |
| funduliforme | NDVRKEKVKENFKNKLIQSTENYNSSLKNQIEEKEKLLRKESKKGAF |
| 1_1_36S | YRTIIKKLQQERIKELSEKSLTEDCEKIIKLYSELRHPLMHYDYQYFEN |
| cont1.14 | LFENKENSELTKNLNLDIFKSLPLVRKMKLNNKVNYLEDNDTLFVLQ |
| (SEQ ID No. | KTKKAKTLYQIYDALCEQKNGFNKFINDFFVSDGEENTVFKQIINEKF |
| 35) | QSEMEFLEKRISESEKKNEKLKKKFDSMKAHFHNINSEDTKEAYFWDI |
| | HSSSNYKTKYNERKNLVNEYTELLGSSKEKKLLREEITQINRKLLKLK |
| | QEMEEITKKNSLFRLEYKMKIAFGFLFCEFDGNISKFKDEFDASNQEKI |
| | IQYHKNGEKYLTYFLKEEEKEKFNLEKMQKIIQKTEEEDWLLPETKNN |
| | LFKFYLLTYLLLPYELKGDFLGFVKKHYYDIKNVDFMDENQNNIQVS |
| | QTVEKQEDYFYHKIRLFEKNTKKYEIVKYSIVPNEKLKQYFEDLGIDIK |
| | YLTGSVESGEKWLGENLGIDIKYLTVEQKSEVSEEKIKKFL |
| Fusobacterium | MGKPNRSSIIKIIISNYDNKGIKEVKVRYNKQAQLDTFLIKSELKDGKFI |
| perfoetens | LYSIVDKAREKYRYSFEIDKTNINKNEILIIKKDIYSNKEDKVIRKYILSF |
| ATCC 29250 | EVSEKNDRTIVTKIKDCLETQKKEKFERENTRRLISETERKLLSEETQK |
| T364DRAFT_ | TYSKIACCSPEDIDSVKIYKIKRYLAYRSNMLLFFSLINDIFVKGVVKD |
| scaffo1d00009.9_ | NGEEVGEIWRIIDSKEIDEKKTYDLLVENFKKRMSQEFINYKQSIENKI |
| C (SEQ ID No. | EKNTNKIKEIEQKLKKEKYKKEINRLKKQLIELNRENDLLEKDKIELSD |
| 36) | EEIREDIEKILKIYSDLRHKLMHYNYQYFENLFENKKISKEKNEDVNLT |
| | ELLDLNLFRYLPLVRQLKLENKTNYLEKEDKITVLGVSDSAIKYYSYY |
| | NFLCEQKNGFNNFINSFFSNDGEENKSFKEKINLSLEKEIEIMEKETNE |
| | KIKEINKNELQLMKEQKELGTAYVLDIHSLNDYKISHNERNKNVKLQ |
| | NDIMNGNRDKNALDKINKKLVELKIKMDKITKRNSILRLKYKLQVAY |
| | GFLMEEYKGNIKKFKDEFDISKEKIKSYKSKGEKYLEVKSEKKYITKIL |
| | NSIEDIHNITWLKNQEENNLFKFYVLTYILLPFEFRGDFLGFVKKHYYD |
| | IKNVEFLDENNDRLTPEQLEKMKNDSFFNKIRLFEKNSKKYDILKESIL |
| | TSERIGKYFSLLNTGAKYFEYGGEENRGIFNKNIIIPIFKYYQIVLKLYN |
| | DVELAMLLTLSESDEKDINKIKELVTLKEKVSPKKIDYEKKYKFSVLL |
| | DCFNRIINLGKKDFLASEEVKEVAKTFTNLAYLRNKICHLNYSKFIDDL |
| | LTIDTNKSTTDSEGKLLINDRIRKLIKFIRENNQKMNISIDYNYINDYYM |
| | KKEKFIFGQRKQAKTIIDSGKKANKRNKAEELLKMYRVKKENINLIYE |
| | LSKKLNELTKSELFLLDKKLLKDIDFTDVKIKNKSFFELKNDVKEVANI |
| | KQALQKHSSELIGIYKKEVIMAIKRSIVSKLIYDEEKVLSIIIYDKTNKK |
| | YEDFLLEIRRERDINKFQFLIDEKKEKLGYEKIIETKEKKKVVVKIQNN |
| | SELVSEPRIIKNKDKKKAKTPEEISKLGILDLTNHYCFNLKITL |
| Fusobacterium | MENKGNNKKIDFDENYNILVAQIKEYFTKEIENYNNRIDNIIDKKELLK |
| ulcerans ATCC | YSEKKEESEKNKKLEELNKLKSQKLKILTDEEIKADVIKIIKIFSDLRHS |
| 49185 cont2.38 | LMHYEYKYFENLFENKKNEELAELLNLNLFKNLTLLRQMKIENKTNY |
| (SEQ ID No. | LEGREEFNIIGKNIKAKEVLGHYNLLAEQKNGFNNFINSFFVQDGTEN |
| 37) | LEFKKLIDEHFVNAKKRLERNIKKSKKLEKELEKMEQHYQRLNCAYV |
| | WDIHTSTTYKKLYNKRKSLIEEYNKQINEIKDKEVITAINVELLRIKKE |
| | MEEITKSNSLFRLKYKMQIAYAFLEIEFGGNIAKFKDEFDCSKMEEVQ |
| | KYLKKGVKYLKYYKDKEAQKNYEFPFEEIFENKDTHNEEWLENTSEN |
| | NLFKFYILTYLLLPMEFKGDFLGVVKKHYYDIKNVDFTDESEKELSQV |
| | QLDKMIGDSFFHKIRLFEKNTKRYEIIKYSILTSDEIKRYFRLLELDVPY |
| | FEYEKGTDEIGIFNKNIILTIFKYYQIIFRLYNDLEIHGLFNISSDLDKILR |
| | DLKSYGNKNINFREFLYVIKQNNNSSTEEEYRKIWENLEAKYLRLHLL |
| | TPEKEEIKTKTKEELEKLNEISNLRNGICHLNYKEIIEEILKTEISEKNKE |
| | ATLNEKIRKVINFIKENELDKVELGFNFINDFFMKKEQFMFGQIKQVK |
| | EGNSDSITTERERKEKNNKKLKETYELNCDNLSEFYETSNNLRERANS |
| | SSLLEDSAFLKKIGLYKVKNNKVNSKVKDEEKRIENIKRKLLKDSSDI |
| | MGMYKAEVVKKLKEKLILIFKHDEEKRIYVTVYDTSKAVPENISKEIL |
| | VKRNNSKEEYFFEDNNKKYVTEYYTLEITETNELKVIPAKKLEGKEFK |
| | TEKNKENKLMLNNHYCFNVKIIY |
| Anaerosalibacter | MKSGRREKAKSNKSSIVRVIISNFDDKQVKEIKVLYTKQGGIDVIKFKS |
| sp. ND1 genome | TEKDEKGRMKFNFDCAYNRLEEEEFNSFGGKGKQSFFVTTNEDLTEL |
| assembly | HVTKRHKTTGEIIKDYTIQGKYTPIKQDRTKVTVSITDNKDHFDSNDL |
| Anaerosalibacter | GDKIRLSRSLTQYTNRILLDADVMKNYREIVCSDSEKVDETINIDSQEI |
| massiliensis | YKINRFLSYRSNMIIYYQMINNFLLHYDGEEDKGGNDSINLINEIWKYE |
| ND1 | NKKNDEKEKIIERSYKSIEKSINQYILNHNTEVESGDKEKKIDISEERIK |
| (SEQ ID No. | EDLKKTFILFSRLRHYMVHYNYKFYENLYSGKNFIIYNKDKSKSRRFS |
| 38) | ELLDLNIFKELSKIKLVKNRAVSNYLDKKTTIHVLNKNINAIKLLDIYR |
| | DICETKNGFNNFINNMMTISGEEDKEYKEMVTKHFNENMNKLSIYLE |
| | NFKKHSDFKTNNKKKETYNLLKQELDEQKKLRLWFNAPYVYDIHSS |
| | KKYKELYVERKKYVDIHSKLIEAGINNDNKKKLNEINVKLCELNTEM |
| | KEMTKLNSKYRLQYKLQLAFGFILEEFNLDIDKFVSAFDKDNNLTISK |
| | FMEKRETYLSKSLDRRDNRFKKLIKDYKFRDTEDIFCSDRENNLVKLY |
| | ILMYILLPVEIRGDFLGFVKKNYYDLKHVDFIDKRNNDNKDTFFHDLR |
| | LFEKNVKRLEVTSYSLSDGFLGKKSREKFGKELEKFIYKNVSIALPTNI |
| | DIKEFNKSLVLPMMKNYQIIFKLLNDIEISALFLIAKKEGNEGSITFKKV |
| | IDKVRKEDMNGNINFSQVMKMALNEKVNCQIRNSIAHINMKQLYIEP |
| | LNIYINNNQNKKTISEQMEEIIDICITKGLTGKELNKNIINDYYMKKEKL |
| | VFNLKLRKRNNLVSIDAQQKNMKEKSILNKYDLNYKDENLNIKEIILK |
| | VNDLNNKQKLLKETTEGESNYKNALSKDILLLNGIIRKNINFKIKEMIL |
| | GIIQQNEYRYVNINIYDKIRKEDHNIDLKINNKYIEISCYENKSNESTDE |
| | RINFKIKYMDLKVKNELLVPSCYEDIYIKKKIDLEIRYIENCKVVYIDIY |
| | YKKYNINLEFDGKTLFVKFNKDVKKNNQKVNLESNYIQNIKFIVS |

[1086] The protein sequences of the C2c2 (Cas13a) species are listed in the Table below.

| | | | |
|---|---|---|---|
| c2c2-5 | 1 | Lachno- | MQISKVNHKHVAVGQKDRERITGFIYNDPVGDEKSLEDVVAKRA |
| | | spiraceae | NDTKVLFNVFNTKDLYDSQESDKSEKDKEIISKGAKFVAKSFNSAI |
| | | bacterium | TILKKQNKIYSTLTSQQVIKELKDKFGGARIYDDDIEEALTETLKKS |
| | | MA2020 | FRKENVRNSIKVLIENAAGIRSSLSKDEEELIQEYFVKQLVEEYTKT |
| | | (SEQ ID | KLQKNVVKSIKNQNMVIQPDSDSQVLSLSESRREKQSSAVSSDTLV |
| | | No. 39) | NCKEKDVLKAFLTDYAVLDEDERNSLLWKLRNLVNLYFYGSESIR |
| | | | DYSYTKEKSVWKEHDEQKANKTLFIDEICHITKIGKNGKEQKVLD |
| | | | YEENRSRCRKQNINYYRSALNYAKNNTSGIFENEDSNHFWIHLIEN |
| | | | EVERLYNGIENGEEFKFETGYISEKVWKAVINHLSIKYIALGKAVY |
| | | | NYAMKELSSPGDIEPGKIDDSYINGITSFDYEIIKAEESLQRDISMNV |
| | | | VFATNYLACATVDTDKDFLLFSKEDIRSCTKKDGNLCKNIMQFWG |
| | | | GYSTWKNFCEEYLKDDKDALELLYSLKSMLYSMRNSSFHFSTENV |
| | | | DNGSWDTELIGKLFEEDCNRAARIEKEKFYNNNLHMFYSSSLLEK |
| | | | VLERLYSSHHERASQVPSFNRVFVRKNFPSSLSEQRITPKFTDSKDE |
| | | | QIWQSAVYYLCKEIYYNDFLQSKEAYKLFREGVKNLDKNDINNQK |
| | | | AADSFKQAVVYYGKAIGNATLSQVCQAIMTEYNRQNNDGLKKKS |
| | | | AYAEKQNSNKYKHYPLFLKQVLQSAFWEYLDENKEIYGFISAQIH |
| | | | KSNVEIKAEDFIANYSSQQYKKLVDKVKKTPELQKWYTLGRLINP |
| | | | RQANQFLGSIRNYVQFVKDIQRRAKENGNPIRNYYEVLESDSIIKIL |
| | | | EMCTKLNGTTSNDIHDYFRDEDEYAEYISQFVNFGDVHSGAALNA |
| | | | FCNSESEGKKNGIYYDGINPIVNRNWVLCKLYGSPDLISKIISRVNE |
| | | | NMIHDFHKQEDLIREYQIKGICSNKKEQQDLRTFQVLKNRVELRDI |
| | | | VEYSEIINELYGQLIKWCYLRERDLMYFQLGFHYLCLNNASSKEA |
| | | | DYIKINVDDRNISGAILYQIAAMYINGLPVYYKKDDMYVALKSGK |
| | | | KASDELNSNEQTSKKINYFLKYGNNILGDKKDQLYLAGLELFENV |
| | | | AEHENIIIFRNEIDHFHYFYDRDRSMLDLYSEVFDRFFTYDMKLRK |
| | | | NVVNMLYNILLDHNIVSSFVFETGEKKVGRGDSEVIKPSAKIRLRA |
| | | | NNGVSSDVFTYKVGSKDELKIATLPAKNEEFLLNVARLIYYPDME |
| | | | AVSENMVREGVVKVEKSNDKKGKISRGSNTRSSNQSKYNNKSKN |
| | | | RMNYSMGSIFEKMDLKFD |
| c2c2-6 | 2 | Lachno- | MKISKVREENRGAKLTVNAKTAVVSENRSQEGILYNDPSRYGKSR |
| | | spiraceae | KNDEDRDRYIESRLKSSGKLYRIFNEDKNKRETDELQWFLSEIVKK |
| | | bacterium | INRRNGLVLSDMLSVDDRAFEKAFEKYAELSYTNRRNKVSGSPAF |
| | | NK4A179 | ETCGVDAATAERLKGIISETNFINRIKNNIDNKVSEDIIDRIIAKYLK |
| | | (SEQ ID | KSLCRERVKRGLKKLLMNAFDLPYSDPDIDVQRDFIDYVLEDFYH |
| | | No. 40) | VRAKSQVSRSIKNMNMPVQPEGDGKFAITVSKGGTESGNKRSAEK |
| | | | EAFKKFLSDYASLDERVRDDMLRRMRRLVVLYFYGSDDSKLSDV |
| | | | NEKFDVWEDHAARRVDNREFIKLPLENKLANGKTDKDAERIRKN |
| | | | TVKELYRNQNIGCYRQAVKAVEEDNNGRYFDDKMLNMFFIHRIE |
| | | | YGVEKIYANLKQVTEFKARTGYLSEKIWKDLINYISIKYIAMGKAV |
| | | | YNYAMDELNASDKKEIELGKISEEYLSGISSFDYELIKAEEMLQRET |
| | | | AVYVAFAARHLSSQTVELDSENSDFLLLKPKGTMDKNDKNKLAS |
| | | | NNILNFLKDKETLRDTILQYFGGHSLWTDFPFDKYLAGGKDDVDF |
| | | | LTDLKDVIYSMRNDSFHYATENHNNGKWNKELISAMFEHETERM |
| | | | TVVMKDKFYSNNLPMFYKNDDLKKLLIDLYKDNVERASQVPSFN |
| | | | KVFVRKNFPALVRDKDNLGIELDLKADADKGENELKFYNALYYM |
| | | | FKEIYYNAFLNDKNVRERFITKATKVADNYDRNKERNLKDRIKSA |
| | | | GSDEKKKLREQLQNYIAENDFGQRIKNIVQVNPDYTLAQICQLIMT |
| | | | EYNQQNNGCMQKKSAARKDINKDSYQHYKMLLLVNLRKAFLEFI |
| | | | KENYAFVLKPYKHDLCDKADFVPDFAKYVKPYAGLISRVAGSSEL |
| | | | QKWYIVSRFLSPAQANHMLGFLHSYKQYVWDIYRRASETGTEINH |
| | | | SIAEDKIAGVDITDVDAVIDLSVKLCGTISSEISDYFKDDEVYAEYIS |
| | | | SYLDFEYDGGNYKDSLNRFCNSDAVNDQKVALYYDGEHPKLNRN |
| | | | IILSKLYGERRFLEKITDRVSRSDIVEYYKLKKETSQYQTKGIFDSED |
| | | | EQKNIKKFQEMKNIVEFRDLMDYSEIADELQGQLINWIYLRERDL |
| | | | MNFQLGYHYACLNNDSNKQATYVTLDYQGKKNRKINGAILYQIC |
| | | | AMYINGLPLYYVDKDSSEWTVSDGKESTGAKIGEFYRYAKSFENT |
| | | | SDCYASGLEIFENISEHDNITELRNYIEHFRYYSSFDRSFLGIYSEVF |
| | | | DRFFTYDLKYRKNVPTILYNILLQHFVNVRFEFVSGKKMIGIDKKD |
| | | | RKIAKEKECARITIREKNGVYSEQFTYKLKNGTVYVDARDKRYLQ |
| | | | SIIRLLFYPEKVNMDEMIEVKEKKKPSDNNTGKGYSKRDRQQDRK |
| | | | EYDKYKEKKKKEGNFLSGMGGNINWDEINAQLKN |
| c2c2-7 | 3 | [Clostridium] | MKFSKVDHTRSAVGIQKATDSVHGMLYTDPKKQEVNDLDKRFDQ |
| | | aminophilum | LNVKAKRLYNVFNQSKAEEDDDEKRFGKVVKKLNRELKDLLFHR |
| | | DSM | EVSRYNSIGNAKYNYYGIKSNPEEIVSNLGMVESLKGERDPQKVIS |
| | | 10710 | KLLLYYLRKGLKPGTDGLRMILEASCGLRKLSGDEKELKVFLQTL |
| | | (SEQ ID | DEDFEKKTFKKNLIRSIENQNMAVQPSNEGDPIIGITQGRFNSQKNE |
| | | No. 41) | EKSAIERMMSMYADLNEDHREDVLRKLRRLNVLYFNVDTEKTEE |
| | | | PTLPGEVDTNPVFEVWHDHEKGKENDRQFATFAKILTEDRETRKK |
| | | | EKLAVKEALNDLKSAIRDHNIMAYRCSIKVTEQDKDGLFFEDQRIN |
| | | | RFWIHHIESAVERILASINPEKLYKLRIGYLGEKVWKDLLNYLSIKY |
| | | | IAVGKAVFHFAMEDLGKTGQDIELGKLSNSVSGGLTSFDYEQIRAD |
| | | | ETLQRQLSVEVAFAANNLFRAVVGQTGKKIEQSKSEENEEDFLLW |
| | | | KAEKIAESIKKEGEGNTLKSILQFFGGASSWDLNHFCAAYGNESSA |
| | | | LGYETKFADDLRKAIYSLRNETFHFTTLNKGSFDWNAKLIGDMFS |
| | | | HEAATGIAVERTRFYSNNLPMFYRESDLKRIMDHLYNTYHPRASQ |
| | | | VPSFNSVFVRKNFRLFLSNTLNTNTSFDTEVYQKWESGVYYLFKEI |
| | | | YYNSFLPSGDAHHLFFEGLRRIRKEADNLPIVGKEAKKRNAVQDF |
| | | | GRRCDELKNLSLSAICQMIMTEYNEQNNGNRKVKSTREDKRKPDI |
| | | | FQHYKMLLLRTLQEAFAIYIRREEFKFIFDLPKTLYVMKPVEEFLPN |
| | | | WKSGMFDSLVERVKQSPDLQRWYVLCKFLNGRLLNQLSGVIRSYI |
| | | | QFAGDIQRRAKANHNRLYMDNTQRVEYYSNVLEVVDFCIKGTSR |
| | | | FSNVFSDYFRDEDAYADYLDNYLQFKDEKIAEVSSFAALKTFCNE |
| | | | EEVKAGIYMDGENPVMQRNIVMAKLFGPDEVLKNVVPKVTREEIE |
| | | | EYYQLEKQIAPYRQNGYCKSEEDQKKLLRFQRIKNRVEFQTITEFS |
| | | | EIINELLGQLISWSFLRERDLLYFQLGFHYLCLHNDTEKPAEYKEIS |
| | | | REDGTVIRNAILHQVAAMYVGGLPVYTLADKKLAAFEKGEADCK |
| | | | LSISKDTAGAGKKIKDFFRYSKYVLIKDRMLTDQNQKYTIYLAGLE |
| | | | LFENTDEHDNITDVRKYVDHFKYYATSDENAMSILDLYSEIHDRFF |
| | | | TYDMKYQKNVANMLENILLRHFVLIRPEFFTGSKKVGEGKKITCK |
| | | | ARAQIEIAENGMRSEDFTYKLSDGKKNISTCMIAARDQKYLNTVA |
| | | | RLLYYPHEAKKSIVDTREKKNNKKTNRGDGTFNKQKGTARKEKD |
| | | | NGPREFNDTGFSNTPFAGFDPFRNS |
| c2c2-8 | 5 | Carnobacterium | MRITKVKIKLDNKLYQVTMQKEEKYGTLKLNEESRKSTAEILRLK |
| | | gallinarum | KASFNKSFHSKTINSQKENKNATIKKNGDYISQIFEKLVGVDTNKNI |
| | | DSM 4847 | RKPKMSLTDLKDLPKKDLALFIKRKFKNDDIVEIKNLDLISLFYNA |
| | | (SEQ ID | LQKVPGEHFTDESWADFCQEMMPYREYKNKFIERKIILLANSIEQN |
| | | No. 42) | KGFSINPETFSKRKRVLHQWAIEVQERGDFSILDEKLSKLAEIYNFK |
| | | | KMCKRVQDELNDLEKSMKKGKNPEKEKEAYKKQKNFKIKTIWK |
| | | | DYPYKTHIGLIEKIKENEELNQFNIEIGKYFEHYFPIKKERCTEDEPY |
| | | | YLNSETIATTVNYQLKNALISYLMQIGKYKQFGLENQVLDSKKLQ |
| | | | EIGIYEGFQTKFMDACVFATSSLKNIIEPMRSGDILGKREFKEAIATS |
| | | | SFVNYHEIFFPYFPFELKGMKDRESELIPFGEQTEAKQMQNIWALR |
| | | | GSVQQIRNEIFHSFDKNQKFNLPQLDKSNFEFDASENSTGKSQSYIE |
| | | | TDYKFLFEAEKNQLEQFFIERIKSSGALEYYPLKSLEKLFAKKEMK |
| | | | FSLGSQVVAFAPSYKKLVKKGHSYQTATEGTANYLGLSYYNRYEL |
| | | | KEESFQAQYYLLKLIYQYVFLPNFSQGNSPAFRETVKAILRINKDE |
| | | | ARKKMKKNKKFLRKYAFEQVREMEFKETPDQYMSYLQSEMREE |
| | | | KVRKAEKNDKGFEKNITMNFEKLLMQIFVKGFDVFLTTFAGKELL |
| | | | LSSEEKVIKETEISLSKKINEREKTLKASIQVEHQLVATNSAISYWLF |
| | | | CKLLDSRHLNELRNEMIKFKQSRIKFNHTQHAELIQNLLPIVELTILS |
| | | | NDYDEKNDSQNVDVSAYFEDKSLYETAPYVQTDDRTRVSFRPILK |
| | | | LEKYHTKSLIEALLKDNPQFRVAATDIQEWMHKREEIGELVEKRK |
| | | | NLHTEWAEGQQTLGAEKREEYRDYCKKIDRFNWKANKVTLTYLS |
| | | | QLHYLITDLLGRMVGFSALFERDLVYFSRSFSELGGETYHISDYKN |
| | | | LSGVLRLNAEVKPIKIKNIKVIDNEENPYKGNEPEVKPFLDRLHAY |
| | | | LENVIGIKAVHGKIRNQTAHLSVLQLELSMIESMNNLRDLMAYDR |
| | | | KLKNAVTKSMIKILDKHGMILKLKIDENHKNFEIESLIPKEIIHLKDK |
| | | | AIKTNQVSEEYCQLVLALLTTNPGNQLN |
| c2c2-9 | 6 | Carnobacterium | MRMTKVKINGSPVSMNRSKLNGHLVWNGTTNTVNILTKKEQSFA |
| | | gallinarum | ASFLNKTLVKADQVKGYKVLAENIFIIFEQLEKSNSEKPSVYLNNIR |
| | | DSM 4847 | RLKEAGLKRFFKSKYHEEIKYTSEKNQSVPTKLNLIPLFFNAVDRIQ |
| | | (SEQ ID | EDKFDEKNWSYFCKEMSPYLDYKKSYLNRKKEILANSIQQNRGFS |
| | | No. 43) | MPTAEEPNLLSKRKQLFQQWAMKFQESPLIQQNNFAVEQFNKEFA |
| | | | NKINELAAVYNVDELCTAITEKLMNFDKDKSNKTRNFEIKKLWKQ |
| | | | HPHNKDKALIKLFNQEGNEALNQFNIELGKYFEHYFPKTGKKESA |
| | | | ESYYLNPQTIIKTVGYQLRNAFVQYLLQVGKLHQYNKGVLDSQTL |
| | | | QEIGMYEGFQTKFMDACVFASSSLRNIIQATTNEDILTREKFKKELE |
| | | | KNVELKHDLFFKTEIVEERDENPAKKIAMTPNELDLWAIRGAVQR |
| | | | VRNQIFHQQINKRHEPNQLKVGSFENGDLGNVSYQKTIYQKLFDA |
| | | | EIKDIEIYFAEKIKSSGALEQYSMKDLEKLFSNKELTLSLGGQVVAF |
| | | | APSYKKLYKQGYFYQNEKTIELEQFTDYDFSNDVFKANYYLIKLIY |
| | | | HYVFLPQFSQANNKLFKDTVHYVIQQNKELNTTEKDKKNNKKIRK |
| | | | YAFEQVKLMKNESPEKYMQYLQREMQEERTIKEAKKTNEEKPNY |
| | | | NFEKLLIQIFIKGFDTFLRNFDLNLNPAEELVGTVKEKAEGLRKRKE |
| | | | RIAKILNVDEQIKTGDEEIAFWIFAKLLDARHLSELRNEMIKFKQSS |
| | | | VKKGLIKNGDLIEQMQPILELCILSNDSESMEKESFDKIEVFLEKVE |
| | | | LAKNEPYMQEDKLTPVKFRFMKQLEKYQTRNFIENLVIENPEFKVS |
| | | | EKIVLNWHEEKEKIADLVDKRTKLHEEWASKAREIEEYNEKIKKN |
| | | | KSKKLDKPAEFAKFAEYKIICEAIENFNRLDHKVRLTYLKNLHYLM |
| | | | IDLMGRMVGFSVLFERDFVYMGRSYSALKKQSIYLNDYDTFANIR |
| | | | DWEVNENKHLFGTSSSDLTFQETAEFKNLKKPMENQLKALLGVT |
| | | | NHSFEIRNNIAHLHVLRNDGKGEGVSLLSCMNDLRKLMSYDRKLK |
| | | | NAVTKAIIKILDKHGMILKLTNNDHTKPFEIESLKPKKIIHLEKSNHS |
| | | | FPMDQVSQEYCDLVKKMLVFTN |
| c2c2- | 7 | Paludibacter | MRVSKVKVKDGGKDKMVLVHRKTTGAQLVYSGQPVSNETSNILP |
| 10 | | propioni- | EKKRQSFDLSTLNKTIIKFDTAKKQKLNVDQYKIVEKIFKYPKQEL |
| | | cigenes WB4 | PKQIKAEEILPFLNHKFQEPVKYWKNGKEESFNLTLLIVEAVQAQD |
| | | (SEQ ID | KRKLQPYYDWKTWYIQTKSDLLKKSIENNRIDLTENLSKRKKALL |
| | | No. 44) | AWETEFTASGSIDLTHYHKVYMTDVLCKMLQDVKPLTDDKGKIN |
| | | | TNAYHRGLKKALQNHQPAIFGTREVPNEANRADNQLSIYHLEVVK |
| | | | YLEHYFPIKTSKRRNTADDIAHYLKAQTLKTTIEKQLVNAIRANIIQ |
| | | | QGKTNHHELKADTTSNDLIRIKTNEAFVLNLTGTCAFAANNIRNM |
| | | | VDNEQTNDILGKGDFIKSLLKDNTNSQLYSFFFGEGLSTNKAEKET |
| | | | QLWGIRGAVQQIRNNVNHYKKDALKTVFNISNFENPTITDPKQQT |
| | | | NYADTIYKARFINELEKIPEAFAQQLKTGGAVSYYTIENLKSLLTTF |
| | | | QFSLCRSTIPFAPGFKKVFNGGINYQNAKQDESFYELMLEQYLRKE |
| | | | NFAEESYNARYFMLKLIYNNLFLPGFTTDRKAFADSVGFVQMQNK |
| | | | KQAEKVNPRKKEAYAFEAVRPMTAADSIADYMAYVQSELMQEQ |
| | | | NKKEEKVAEETRINFEKFVLQVFIKGFDSFLRAKEFDFVQMPQPQL |
| | | | TATASNQQKADKLNQLEASITADCKLTPQYAKADDATHIAFYVFC |
| | | | KLLDAAHLSNLRNELIKFRESVNEFKFHHLLEIIEICLLSADVVPTD |
| | | | YRDLYSSEADCLARLRPFIEQGADITNWSDLFVQSDKHSPVIHANIE |
| | | | LSVKYGTTKLLEQIINKDTQFKTTEANFTAWNTAQKSIEQLIKQRE |
| | | | DHHEQWVKAKNADDKEKQERKREKSNFAQKFIEKHGDDYLDICD |
| | | | YINTYNWLDNKMHFVHLNRLHGLTIELLGRMAGFVALFDRDFQFF |
| | | | DEQQIADEFKLHGFVNLHSIDKKLNEVPTKKIKEIYDIRNKIIQINGN |
| | | | KINESVRANLIQFISSKRNYYNNAFLHVSNDEIKEKQMYDIRNHIA |
| | | | HFNYLTKDAADFSLIDLINELRELLHYDRKLKNAVSKAFIDLFDKH |
| | | | GMILKLKLNADHKLKVESLEPKKIYHLGSSAKDKPEYQYCTNQV |
| | | | MMAYCNMCRSLLEMKK |
| c2c2- | 9 | Listeria | MLALLHQEVPSQKLHNLKSLNTESLTKLFKPKFQNMISYPPSKGAE |
| 11 | | weihensteph- | HVQFCLTDIAVPAIRDLDEIKPDWGIFFEKLKPYTDWAESYIHYKQ |
| | | anensis FSL | TTIQKSIEQNKIQSPDSPRKLVLQKYVTAFLNGEPLGLDLVAKKYK |
| | | R9-0317 | LADLAESFKVVDLNEDKSANYKIKACLQQHQRNILDELKEDPELN |
| | | (SEQ ID | QYGIEVKKYIQRYFPIKRAPNRSKHARADFLKKELIESTVEQQFKN |
| | | No. 45) | AVYHYVLEQGKMEAYELTDPKTKDLQDIRSGEAFSFKFINACAFA |
| | | | SNNLKMILNPECEKDILGKGDFKKNLPNSTTQSDVVKKMIPFFSDEI |
| | | | QNVNFDEAIWAIRGSIQQIRNEVYHCKKHSWKSILKIKGFEFEPNN |
| | | | MKYTDSDMQKLMDKDIAKIPDFIEEKLKSSGIIRFYSHDKLQSIWE |
| | | | MKQGFSLLTTNAPFVPSFKRVYAKGHDYQTSKNRYYDLGLTTFDI |
| | | | LEYGEEDFRARYFLTKLVYYQQFMPWFTADNNAFRDAANFVLRL |
| | | | NKNRQQDAKAFINIREVEEGEMPRDYMGYVQGQIAIHEDSTEDTP |
| | | | NHFEKFISQVFIKGFDSHMRSADLKFIKNPRNQGLEQSEIEEMSFDI |
| | | | KVEPSFLKNKDDYIAFWTFCKMLDARHLSELRNEMIKYDGHLTGE |
| | | | QEIIGLALLGVDSRENDWKQFFSSEREYEKIMKGYVGEELYQREPY |
| | | | RQSDGKTPILFRGVEQARKYGTETVIQRLFDASPEFKVSKCNITEW |
| | | | ERQKETIEETIERRKELHNEWEKNPKKPQNNAFFKEYKECCDAIDA |
| | | | YNWHKNKTTLVYVNELHHLLIEILGRYVGYVAIADRDFQCMANQ |
| | | | YFKHSGITERVEYWGDNRLKSIKKLDTFLKKEGLFVSEKNARNHIA |
| | | | HLNYLSLKSECTLLYLSERLREIFKYDRKLKNAVSKSLIDILDRHG |
| | | | MSVVFANLKENKHRLVIKSLEPKKLRHLGEKKIDNGYIETNQVSEE |
| | | | YCGIVKRLLEI |
| c2c2- | 10 | Listeriaceae | MKITKMRVDGRTIVMERTSKEGQLGYEGIDGNKTTEIIFDKKKESF |
| 12 | | bacterium | YKSILNKTVRKPDEKEKNRRKQAINKAINKEITELMLAVLHQEVPS |
| | | FSL M6- | QKLHNLKSLNTESLTKLFKPKFQNMISYPPSKGAEHVQFCLTDIAV |
| | | 0635 = | PAIRDLDEIKPDWGIFFEKLKPYTDWAESYIHYKQTTIQKSIEQNKI |
| | | Listeria | QSPDSPRKLVLQKYVTAFLNGEPLGLDLVAKKYKLADLAESFKLV |
| | | newyorkensis | DLNEDKSANYKIKACLQQHQRNILDELKEDPELNQYGIEVKKYIQ |
| | | FSL M6- | RYFPIKRAPNRSKHARADFLKKELIESTVEQQFKNAVYHYVLEQG |
| | | 0635 | KMEAYELTDPKTKDLQDIRSGEAFSFKFINACAFASNNLKMILNPE |
| | | (SEQ ID | CEKDILGKGNFKKNLPNSTTRSDVVKKMIPFFSDELQNVNFDEAIW |
| | | No. 46) | AIRGSIQQIRNEVYHCKKHSWKSILKIKGFEFEPNNMKYADSDMQ |
| | | | KLMDKDIAKIPEFIEEKLKSSGVVRFYRHDELQSIWEMKQGFSLLT |
| | | | TNAPFVPSFKRVYAKGHDYQTSKNRYYNLDLTTFDILEYGEEDFR |
| | | | ARYFLTKLVYYQQFMPWFTADNNAFRDAANFVLRLNKNRQQDA |
| | | | KAFINIREVEEGEMPRDYMGYVQGQIAIHEDSIEDTPNHFEKFISQV |
| | | | FIKGFDRHMRSANLKFIKNPRNQGLEQSEIEEMSFDIKVEPSFLKNK |
| | | | DDYIAFWIFCKMLDARHLSELRNEMIKYDGHLTGEQEIIGLALLGV |
| | | | DSRENDWKQFFSSEREYEKIMKGYVVEELYQREPYRQSDGKTPILF |
| | | | RGVEQARKYGTETVIQRLFDANPEFKVSKCNLAEWERQKETIEETI |
| | | | KRRKELHNEWAKNPKKPQNNAFFKEYKECCDAIDAYNWHKNKT |
| | | | TLAYVNELHHLLIEILGRYVGYVAIADRDFQCMANQYFKHSGITER |
| | | | VEYWGDNRLKSIKKLDTFLKKEGLFVSEKNARNHIAHLNYLSLKS |
| | | | ECTLLYLSERLREIFKYDRKLKNAVSKSLIDILDRHGMSVVFANLK |
| | | | ENKHRLVIKSLEPKKLRHLGGKKIDGGYIETNQVSEEYCGIVKRLL |
| | | | EM |
| c2c2- | 12 | Leptotrichia | MKVTKVDGISHKKYIEEGKLVKSTSEENRTSERLSELLSIRLDIYIK |
| 13 | | wadei F0279 | NPDNASEEENRIRRENLKKFFSNKVLHLKDSVLYLKNRKEKNAVQ |
| | | (SEQ ID | DKNYSEEDISEYDLKNKNSFSVLKKILLNEDVNSEELEIFRKDVEA |
| | | No. 47) | KLNKINSLKYSFEENKANYQKINENNVEKVGGKSKRNIIYDYYRES |
| | | | AKRNDYINNVQEAFDKLYKKEDIEKLFFLIENSKKHEKYKIREYYH |
| | | | KIIGRKNDKENFAKIIYEEIQNVNNIKELIEKIPDMSELKKSQVFYKY |
| | | | YLDKEELNDKNIKYAFCHFVEIEMSQLLKNYVYKRLSNISNDKIKR |
| | | | IFEYQNLKKLIENKLLNKLDTYVRNCGKYNYYLQVGEIATSDFIAR |
| | | | NRQNEAFLRNIIGVSSVAYFSLRNILETENENDITGRMRGKTVKNN |
| | | | KGEEKYVSGEVDKIYNENKQNEVKENLKMFYSYDFNMDNKNEIE |
| | | | DFFANIDEAISSIRHGIVHFNLELEGKDIFAFKNIAPSEISKKMFQNEI |
| | | | NEKKLKLKIFKQLNSANVFNYYEKDVIIKYLKNTKFNFVNKNIPFV |
| | | | PSFTKLYNKIEDLRNTLKFFWSVPKDKEEKDAQIYLLKNIYYGEFL |
| | | | NKFVKNSKVFFKITNEVIKINKQRNQKTGHYKYQKFENIEKTVPVE |
| | | | YLAIIQSREMINNQDKEEKNTYIDFIQQIFLKGFIDYLNKNNLKYIES |
| | | | NNNNDNNDIFSKIKIKKDNKEKYDKILKNYEKHNRNKEIPHEINEF |
| | | | VREIKLGKILKYTENLNMFYLILKLLNHKELTNLKGSLEKYQSANK |
| | | | EETFSDELELINLLNLDNNRVTEDFELEANEIGKFLDFNENKIKDRK |
| | | | ELKKFDTNKIYFDGENIIKHRAFYNIKKYGMLNLLEKIADKAKYKI |
| | | | SLKELKEYSNKKNEIEKNYTMQQNLHRKYARPKKDEKFNDEDYK |
| | | | EYEKAIGNIQKYTHLKNKVEFNELNLLQGLLLKILHRLVGYTSIWE |
| | | | RDLRFRLKGEFPENHYIEEIFNFDNSKNVKYKSGQIVEKYINFYKEL |
| | | | YKDNVEKRSIYSDKKVKKLKQEKKDLYIRNYIAHFNYIPHAEISLL |
| | | | EVLENLRKLLSYDRKLKNAIMKSIVDILKEYGFVATFKIGADKKIEI |
| | | | QTLESEKIVHLKNLKKKKLMTDRNSEELCELVKVMFEYKALE |
| c2c2- | 15 | Rhodobacter | MQIGKVQGRTISEFGDPAGGLKRKISTDGKNRKELPAHLSSDPKAL |
| 14 | | capsulatus | IGQWISGIDKIYRKPDSRKSDGKAIHSPTPSKMQFDARDDLGEAFW |
| | | SB 1003 | KLVSEAGLAQDSDYDQFKRRLHPYGDKFQPADSGAKLKFEADPPE |
| | | (SEQ ID | PQAFHGRWYGAMSKRGNDAKELAAALYEHLHVDEKRIDGQPKR |
| | | No. 48) | NPKTDKFAPGLVVARALGIESSVLPRGMARLARNWGEEEIQTYFV |
| | | | VDVAASVKEVAKAAVSAAQAFDPPRQVSGRSLSPKVGFALAEHL |
| | | | ERVTGSKRCSFDPAAGPSVLALHDEVKKTYKRLCARGKNAARAFP |
| | | | ADKTELLALMRHTHENRVRNQMVRMGRVSEYRGQQAGDLAQSH |
| | | | YWTSAGQTEIKESEIFVRLWVGAFALAGRSMKAWIDPMGKIVNTE |
| | | | KNDRDLTAAVNIRQVISNKEMVAEAMARRGIYFGETPELDRLGAE |
| | | | GNEGFVFALLRYLRGCRNQTFHLGARAGFLKEIRKELEKTRWGKA |
| | | | KEAEHVVLTDKTVAAIRAIIDNDAKALGARLLADLSGAFVAHYAS |
| | | | KEHFSTLYSEIVKAVKDAPEVSSGLPRLKLLLKRADGVRGYVHGL |
| | | | RDTRKHAFATKLPPPPAPRELDDPATKARYIALLRLYDGPFRAYAS |
| | | | GITGTALAGPAARAKEAATALAQSVNVTKAYSDVMEGRTSRLRPP |
| | | | NDGETLREYLSALTGETATEFRVQIGYESDSENARKQAEFIENYRR |
| | | | DMLAFMFEDYIRAKGFDWILKIEPGATAMTRAPVLPEPIDTRGQYE |
| | | | HWQAALYLVMHFVPASDVSNLLHQLRKWEALQGKYELVQDGDA |
| | | | TDQADARREALDLVKRFRDVLVLFLKTGEARFEGRAAPFDLKPFR |
| | | | ALFANPATFDRLFMATPTTARPAEDDPEGDGASEPELRVARTLRG |
| | | | LRQIARYNHMAVLSDLFAKHKVRDEEVARLAEIEDETQEKSQIVA |
| | | | AQELRTDLHDKVMKCHPKTISPEERQSYAAAIKTIEEHRFLVGRVY |
| | | | LGDHLRLHRLMMDVIGRLIDYAGAYERDTGTFLINASKQLGAGAD |
| | | | WAVTIAGAANTDARTQTRKDLAHFNVLDRADGTPDLTALVNRAR |
| | | | EMMAYDRKRKNAVPRSILDMLARLGLTLKWQMKDHLLQDATIT |
| | | | QAAIKHLDKVRLTVGGPAAVTEARFSQDYLQMVAAVFNGSVQNP |
| | | | KPRRRDDGDAWHKPPKPATAQSQPDQKPPNKAPSAGSRLPPPQVG |
| | | | EVYEGVVVKVIDTGSLGFLAVEGVAGNIGLHISRLRRIREDAIIVGR |
| | | | RYRFRVEIYVPPKSNTSKLNAADLVRID |
| c2c2- | 16 | Rhodobacter | MQIGKVQGRTISEFGDPAGGLKRKISTDGKNRKELPAHLSSDPKAL |
| 15 | | capsulatus | IGQWISGIDKIYRKPDSRKSDGKAIHSPTPSKMQFDARDDLGEAFW |
| | | R121 | KLVSEAGLAQDSDYDQFKRRLHPYGDKFQPADSGAKLKFEADPPE |
| | | (SEQ ID | PQAFHGRWYGAMSKRGNDAKELAAALYEHLHVDEKRIDGQPKR |
| | | No. 49) | NPKTDKFAPGLVVARALGIESSVLPRGMARLARNWGEEEIQTYFV |
| | | | VDVAASVKEVAKAAVSAAQAFDPPRQVSGRSLSPKVGFALAEHL |
| | | | ERVTGSKRCSFDPAAGPSVLALHDEVKKTYKRLCARGKNAARAFP |
| | | | ADKTELLALMRHTHENRVRNQMVRMGRVSEYRGQQAGDLAQSH |
| | | | YWTSAGQTEIKESEIFVRLWVGAFALAGRSMKAWIDPMGKIVNTE |
| | | | KNDRDLTAAVNIRQVISNKEMVAEAMARRGIYFGETPELDRLGAE |
| | | | GNEGFVFALLRYLRGCRNQTFHLGARAGFLKEIRKELEKTRWGKA |
| | | | KEAEHVVLTDKTVAAIRAIIDNDAKALGARLLADLSGAFVAHYAS |
| | | | KEHFSTLYSEIVKAVKDAPEVSSGLPRLKLLLKRADGVRGYVHGL |
| | | | RDTRKHAFATKLPPPPAPRELDDPATKARYIALLRLYDGPFRAYAS |
| | | | GITGTALAGPAARAKEAATALAQSVNVTKAYSDVMEGRSSRLRPP |
| | | | NDGETLREYLSALTGETATEFRVQIGYESDSENARKQAEFIENYRR |
| | | | DMLAFMFEDYIRAKGFDWILKIEPGATAMTRAPVLPEPIDTRGQYE |
| | | | HWQAALYLVMHFVPASDVSNLLHQLRKWEALQGKYELVQDGDA |
| | | | TDQADARREALDLVKRFRDVLVLFLKTGEARFEGRAAPFDLKPFR |
| | | | ALFANPATFDRLFMATPTTARPAEDDPEGDGASEPELRVARTLRG |
| | | | LRQIARYNHMAVLSDLFAKHKVRDEEVARLAEIEDETQEKSQIVA |
| | | | AQELRTDLHDKVMKCHPKTISPEERQSYAAAIKTIEEHRFLVGRVY |
| | | | LGDHLRLHRLMMDVIGRLIDYAGAYERDTGTFLINASKQLGAGAD |
| | | | WAVTIAGAANTDARTQTRKDLAHFNVLDRADGTPDLTALVNRAR |
| | | | EMMAYDRKRKNAVPRSILDMLARLGLTLKWQMKDHLLQDATIT |
| | | | QAAIKHLDKVRLTVGGPAAVTEARFSQDYLQMVAAVFNGSVQNP |
| | | | KPRRRDDGDAWHKPPKPATAQSQPDQKPPNKAPSAGSRLPPPQVG |
| | | | EVYEGVVVKVIDTGSLGFLAVEGVAGNIGLHISRLRRIREDAIIVGR |
| | | | RYRFRVEIYVPPKSNTSKLNAADLVRID |
| c2c2- | 17 | Rhodobacter | MQIGKVQGRTISEFGDPAGGLKRKISTDGKNRKELPAHLSSDPKAL |
| 16 | | capsulatus | IGQWISGIDKIYRKPDSRKSDGKAIHSPTPSKMQFDARDDLGEAFW |
| | | DE442 | KLVSEAGLAQDSDYDQFKRRLHPYGDKFQPADSGAKLKFEADPPE |
| | | (SEQ ID | PQAFHGRWYGAMSKRGNDAKELAAALYEHLHVDEKRIDGQPKR |
| | | No. 50) | NPKTDKFAPGLVVARALGIESSVLPRGMARLARNWGEEEIQTYFV |
| | | | VDVAASVKEVAKAAVSAAQAFDPPRQVSGRSLSPKVGFALAEHL |
| | | | ERVTGSKRCSFDPAAGPSVLALHDEVKKTYKRLCARGKNAARAFP |
| | | | ADKTELLALMRHTHENRVRNQMVRMGRVSEYRGQQAGDLAQSH |
| | | | YWTSAGQTEIKESEIFVRLWVGAFALAGRSMKAWIDPMGKIVNTE |
| | | | KNDRDLTAAVNIRQVISNKEMVAEAMARRGIYFGETPELDRLGAE |
| | | | GNEGFVFALLRYLRGCRNQTFHLGARAGFLKEIRKELEKTRWGKA |
| | | | KEAEHVVLTDKTVAAIRAIIDNDAKALGARLLADLSGAFVAHYAS |
| | | | KEHFSTLYSEIVKAVKDAPEVSSGLPRLKLLLKRADGVRGYVHGL |
| | | | RDTRKHAFATKLPPPPAPRELDDPATKARYIALLRLYDGPFRAYAS |
| | | | GITGTALAGPAARAKEAATALAQSVNVTKAYSDVMEGRSSRLRPP |
| | | | NDGETLREYLSALTGETATEFRVQIGYESDSENARKQAEFIENYRR |
| | | | DMLAFMFEDYIRAKGFDWILKIEPGATAMTRAPVLPEPIDTRGQYE |
| | | | HWQAALYLVMHFVPASDVSNLLHQLRKWEALQGKYELVQDGDA |
| | | | TDQADARREALDLVKRFRDVLVLFLKTGEARFEGRAAPFDLKPFR |
| | | | ALFANPATFDRLFMATPTTARPAEDDPEGDGASEPELRVARTLRG |
| | | | LRQIARYNHMAVLSDLFAKHKVRDEEVARLAEIEDETQEKSQIVA |
| | | | AQELRTDLHDKVMKCHPKTISPEERQSYAAAIKTIEEHRFLVGRVY |
| | | | LGDHLRLHRLMMDVIGRLIDYAGAYERDTGTFLINASKQLGAGAD |
| | | | WAVTIAGAANTDARTQTRKDLAHFNVLDRADGTPDLTALVNRAR |
| | | | EMMAYDRKRKNAVPRSILDMLARLGLTLKWQMKDHLLQDATIT |
| | | | QAAIKHLDKVRLTVGGPAAVTEARFSQDYLQMVAAVFNGSVQNP |
| | | | KPRRRDDGDAWHKPPKPATAQSQPDQKPPNKAPSAGSRLPPPQVG |
| | | | EVYEGVVVKVIDTGSLGFLAVEGVAGNIGLHISRLRRIREDAIIVGR |
| | | | RYRFRVEIYVPPKSNTSKLNAADLVRID |
| c2c2-2 | | (SEQ ID No. | MGNLFGHKRWYEVRDKKDFKIKRKVKVKRNYDGNKYILNINENN |
| | | 51) | NKEKIDNNKFIRKYINYKKNDNILKEFTRKFHAGNILFKLKGKEGII |
| | | | RIENNDDFLETEEVVLYIEAYGKSEKLKALGITKKKIIDEAIRQGITK |
| | | | DDKKIEIKRQENEEEIEIDIRDEYTNKTLNDCSIILRIIENDELETKKSI |
| | | | YEIFKNINMSLYKIIEKIIENETEKVFENRYYEEHLREKLLKDDKIDV |
| | | | ILTNFMEIREKIKSNLEILGFVKFYLNVGGDKKKSKNKKMLVEKIL |
| | | | NINVDLTVEDIADFVIKELEFWNITKRIEKVKKVNNEFLEKRRNRT |
| | | | YIKSYVLLDKHEKFKIERENKKDKIVKFFVENIKNNSIKEKIEKILAE |
| | | | FKIDELIKKLEKELKKGNCDTEIFGIFKKHYKVNFDSKKFSKKSDEE |
| | | | KELYKIIYRYLKGRIEKILVNEQKVRLKKMEKIEIEKILNESILSEKIL |
| | | | KRVKQYTLEHIMYLGKLRHNDIDMTTVNTDDFSRLHAKEELDLEL |
| | | | ITFFASTNMELNKIFSRENINNDENIDFFGGDREKNYVLDKKILNSK |
| | | | IKIIRDLDFIDNKNNITNNFIRKFTKIGTNERNRILHAISKERDLQGTQ |
| | | | DDYNKVINIIQNLKISDEEVSKALNLDVVFKDKKNIITKINDIKISEE |
| | | | NNNDIKYLPSFSKVLPEILNLYRNNPKNEPFDTIETEKIVLNALIYVN |
| | | | KELYKKLILEDDLEENESKNIFLQELKKTLGNIDEIDENIIENYYKN |
| | | | AQISASKGNNKAIKKYQKKVIECYIGYLRKNYEELFDFSDFKMNIQ |
| | | | EIKKQIKDINDNKTYERITVKTSDKTIVINDDFEYIISIFALLNSNAVI |
| | | | NKIRNRFFATSVWLNTSEYQNIIDILDEIMQLNTLRNECITENWNLN |
| | | | LEEFIQKMKEIEKDFDDFKIQTKKEIFNNYYEDIKNNILTEFKDDIN |
| | | | GCDVLEKKLEKIVIFDDETKFEIDKKSNILQDEQRKLSNINKKDLKK |
| | | | KVDQYIKDKDQEIKSKILCRIIFNSDFLKKYKKEIDNLIEDMESENE |
| | | | NKFQEIYYPKERKNELYIYKKNLFLNIGNPNFDKIYGLISNDIKMAD |
| | | | AKFLFNIDGKNIRKNKISEIDAILKNLNDKLNGYSKEYKEKYIKKLK |
| | | | ENDDFFAKNIQNKNYKSFEKDYNRVSEYKKIRDLVEFNYLNKIESY |
| | | | LIDINWKLAIQMARFERDMHYIVNGLRELGIIKLSGYNTGISRAYPK |
| | | | RNGSDGFYTTTAYYKFFDEESYKKFEKICYGFGIDLSENSEINKPEN |
| | | | ESIRNYISHFYIVRNPFADYSIAEQIDRVSNLLSYSTRYNNSTYASVF |
| | | | EVFKKDVNLDYDELKKKFKLIGNNDILERLMKPKKVSVLELESYN |
| | | | SDYIKNLIIELLTKIENTNDTL |
| c2c2-3 | | L wadei | MKVTKVDGISHKKYIEEGKLVKSTSEENRTSERLSELLSIRLDIYIK |
| | | (Lw2) | NPDNASEEENRIRRENLKKFFSNKVLHLKDSVLYLKNRKEKNAVQ |
| | | (SEQ ID | DKNYSEEDISEYDLKNKNSFSVLKKILLNEDVNSEELEIFRKDVEA |
| | | No. 52) | KLNKINSLKYSFEENKANYQKINENNVEKVGGKSKRNIIYDYYRES |
| | | | AKRNDYINNVQEAFDKLYKKEDIEKLFFLIENSKKHEKYKIREYYH |
| | | | KIIGRKNDKENFAKIIYEEIQNVNNIKELIEKIPDMSELKKSQVFYKY |
| | | | YLDKEELNDKNIKYAFCHFVEIEMSQLLKNYVYKRLSNISNDKIKR |
| | | | IFEYQNLKKLIENKLLNKLDTYVRNCGKYNYYLQVGEIATSDFIAR |
| | | | NRQNEAFLRNIIGVSSVAYFSLRNILETENENDITGRMRGKTVKNN |
| | | | KGEEKYVSGEVDKIYNENKQNEVKENLKMFYSYDFNMDNKNEIE |
| | | | DFFANIDEAISSIRHGIVHFNLELEGKDIFAFKNIAPSEISKKMFQNEI |
| | | | NEKKLKLKIFKQLNSANVFNYYEKDVIIKYLKNTKFNFVNKNIPFV |
| | | | PSFTKLYNKIEDLRNTLKFFWSVPKDKEEKDAQIYLLKNIYYGEFL |
| | | | NKFVKNSKVFFKITNEVIKINKQRNQKTGHYKYQKFENIEKTVPVE |
| | | | YLAIIQSREMINNQDKEEKNTYIDFIQQIFLKGFIDYLNKNNLKYIES |
| | | | NNNNDNNDIFSKIKIKKDNKEKYDKILKNYEKHNRNKEIPHEINEF |
| | | | VREIKLGKILKYTENLNMFYLILKLLNHKELTNLKGSLEKYQSANK |
| | | | EETFSDELELINLLNLDNNRVTEDFELEANEIGKFLDFNENKIKDRK |
| | | | ELKKFDTNKIYFDGENIIKHRAFYNIKKYGMLNLLEKIADKAKYKI |
| | | | SLKELKEYSNKKNEIEKNYTMQQNLHRKYARPKKDEKFNDEDYK |
| | | | EYEKAIGNIQKYTHLKNKVEFNELNLLQGLLLKILHRLVGYTSIWE |
| | | | RDLRFRLKGEFPENHYIEEIFNFDNSKNVKYKSGQIVEKYINFYKEL |
| | | | YKDNVEKRSIYSDKKVKKLKQEKKDLYIRNYIAHFNYIPHAEISLL |
| | | | EVLENLRKLLSYDRKLKNAIMKSIVDILKEYGFVATFKIGADKKIEI |
| | | | QTLESEKIVHLKNLKKKKLMTDRNSEELCELVKVMFEYKALEKRP |
| | | | AATKKAGQAKKKKGSYPYDVPDYAYPYDVPDYAYPYDVPDYA* |
| c2c2-4 | | Listeria | MWISIKTLIHHLGVLFFCDYMYNRREKKIIEVKTMRITKVEVDRKK |
| | | seeligeri | VLISRDKNGGKLVYENEMQDNTEQIMHHKKSSFYKSVVNKTICRP |
| | | (SEQ ID | EQKQMKKLVHGLLQENSQEKIKVSDVTKLNISNFLNHRFKKSLYY |
| | | No. 53) | FPENSPDKSEEYRIEINLSQLLEDSLKKQQGTFICWESFSKDMELYI |
| | | | NWAENYISSKTKLIKKSIRNNRIQSTESRSGQLMDRYMKDILNKNK |
| | | | PFDIQSVSEKYQLEKLTSALKATFKEAKKNDKEINYKLKSTLQNHE |
| | | | RQIIEELKENSELNQFNIEIRKHLETYFPIKKTNRKVGDIRNLEIGEIQ |
| | | | KIVNHRLKNKIVQRILQEGKLASYEIESTVNSNSLQKIKIEEAFALKF |
| | | | INACLFASNNLRNMVYPVCKKDILMIGEFKNSFKEIKHKKFIRQWS |
| | | | QFFSQEITVDDIELASWGLRGAIAPIRNEIIHLKKHSWKKFFNNPTF |
| | | | KVKKSKIINGKTKDVTSEFLYKETLFKDYFYSELDSVPELIINKMES |
| | | | SKILDYYSSDQLNQVFTIPNFELSLLTSAVPFAPSFKRVYLKGFDYQ |
| | | | NQDEAQPDYNLKLNIYNEKAFNSEAFQAQYSLFKMVYYQVFLPQF |
| | | | TTNNDLFKSSVDFILTLNKERKGYAKAFQDIRKMNKDEKPSEYMS |
| | | | YIQSQLMLYQKKQEEKEKINHFEKFINQVFIKGFNSFIEKNRLTYIC |
| | | | HPTKNTVPENDNIEIPFHTDMDDSNIAFWLMCKLLDAKQLSELRNE |
| | | | MIKFSCSLQSTEEISTFTKAREVIGLALLNGEKGCNDWKELFDDKE |
| | | | AWKKNMSLYVSEELLQSLPYTQEDGQTPVINRSIDLVKKYGTETIL |
| | | | EKLFSSSDDYKVSAKDIAKLHEYDVTEKIAQQESLHKQWIEKPGLA |
| | | | RDSAWTKKYQNVINDISNYQWAKTKVELTQVRHLHQLTIDLLSRL |
| | | | AGYMSIADRDFQFSSNYILERENSEYRVTSWILLSENKNKNKYND |
| | | | YELYNLKNASIKVSSKNDPQLKVDLKQLRLTLEYLELFDNRLKEK |
| | | | RNNISHFNYLNGQLGNSILELFDDARDVLSYDRKLKNAVSKSLKEI |
| | | | LSSHGMEVTFKPLYQTNHHLKIDKLQPKKIHHLGEKSTVSSNQVSN |
| | | | EYCQLVRTLLTMK |

### Example 2: Activity of Cas13c in Eukaryotic Cells

[1087] A luciferase targeting assay was performed as indicated in FIG. 2 with different gRNAs directed against Gluc. Cas13a (C2c2), Cas13b, and Cas13c orthologues were compared as to knockdown of luciferase expression. Knockdown amounts were further compared across targets to identify orthologs which consistently lowered expression (FIG. 3).

[1088] The Cas13c proteins were compared to the following Cas13a proteins which were codon optimized for expression in mammalian cells.

| | | |
|---|---|---|
| C2-17 | Leptotrichia | MKVTKVGGISHKKYTSEGRLVKSESEENRTDERLSALLNMRLDM |
| | buccalis C- | YIKNPSSTETKENQKRIGKLKKFFSNKMVYLKDNTLSLKNGKKENI |
| | 1013-b | DREYSETDILESDVRDKKNFAVLKKIYLNENVNSEELEVFRNDIKK |
| | (SEQ ID | KLNKINSLKYSFEKNKANYQKINENNIEKVEGKSKRNIIYDYYRES |
| | No. 54) | AKRDAYVSNVKEAFDKLYKEEDIAKLVLEIENLTKLEKYKIREFYH |
| | | EIIGRKNDKENFAKIIYEEIQNVNNMKELIEKVPDMSELKKSQVFY |
| | | KYYLDKEELNDKNIKYAFCHFVEIEMSQLLKNYVYKRLSNISNDKI |
| | | KRIFEYQNLKKLIENKLLNKLDTYVRNCGKYNYYLQDGEIATSDFI |
| | | ARNRQNEAFLRNIIGVSSVAYFSLRNILETENENDITGRMRGKTVK |
| | | NNKGEEKYVSGEVDKIYNENKKNEVKENLKMFYSYDFNMDNKN |
| | | EIEDFFANIDEAISSIRHGIVHFNLELEGKDIFAFKNIAPSEISKKMFQ |
| | | NEINEKKLKLKIFRQLNSANVFRYLEKYKILNYLKRTRFEFVNKNIP |
| | | FVPSFTKLYSRIDDLKNSLGIYWKTPKTNDDNKTKEIIDAQIYLLKN |
| | | IYYGEFLNYFMSNNGNFFEISKEIIELNKNDKRNLKTGFYKLQKFE |
| | | DIQEKIPKEYLANIQSLYMINAGNQDEEEKDTYIDFIQKIFLKGFMT |
| | | YLANNGRLSLIYIGSDEETNTSLAEKKQEFDKFLKKYEQNNNIKIPY |
| | | EINEFLREIKLGNILKYTERLNMFYLILKLLNHKELTNLKGSLEKYQ |
| | | SANKEEAFSDQLELINLLNLDNNRVTEDFELEADEIGKFLDFNGNK |
| | | VKDNKELKKFDTNKIYFDGENIIKHRAFYNIKKYGMLNLLEKIADK |
| | | AGYKISIEELKKYSNKKNEIEKNHKMQENLHRKYARPRKDEKFTD |
| | | EDYESYKQAIENIEEYTHLKNKVEFNELNLLQGLLLRILHRLVGYT |
| | | SIWERDLRFRLKGEFPENQYIEEIFNFENKKNVKYKGGQIVEKYIKF |
| | | YKELHQNDEVKINKYSSANIKVLKQEKKDLYIRNYIAHFNYIPHAE |
| | | ISLLEVLENLRKLLSYDRKLKNAVMKSVVDILKEYGFVATFKIGAD |
| | | KKIGIQTLESEKIVHLKNLKKKKLMTDRNSEELCKLVKIMFEYKME |
| | | EKKSEN |
| C2-18 | Herbinix | MKLTRRRISGNSVDQKITAAFYRDMSQGLLYYDSEDNDCTDKVIE |
| | hemicellulos | SMDFERSWRGRILKNGEDDKNPFYMFVKGLVGSNDKIVCEPIDVD |
| | ilytica | SDPDNLDILINKNLTGFGRNLKAPDSNDTLENLIRKIQAGIPEEEVLP |
| | (SEQ ID | ELKKIKEMIQKDIVNRKEQLLKSIKNNRIPFSLEGSKLVPSTKKMK |
| | No. 55) | WLFKLIDVPNKTFNEKMLEKYWEIYDYDKLKANITNRLDKTDKK |
| | | ARSISRAVSEELREYHKNLRTNYNRFVSGDRPAAGLDNGGSAKYN |
| | | PDKEEFLLFLKEVEQYFKKYFPVKSKHSNKSKDKSLVDKYKNYCS |
| | | YKVVKKEVNRSIINQLVAGLIQQGKLLYYFYYNDTWQEDFLNSYG |
| | | LSYIQVEEAFKKSVMTSLSWGINRLTSFFIDDSNTVKFDDITTKKAK |
| | | EAIESNYFNKLRTCSRMQDHFKEKLAFFYPVYVKDKKDRPDDDIE |
| | | NLIVLVKNAIESVSYLRNRTFHFKESSLLELLKELDDKNSGQNKID |
| | | YSVAAEFIKRDIENLYDVFREQIRSLGIAEYYKADMISDCFKTCGLE |
| | | FALYSPKNSLMPAFKNVYKRGANLNKAYIRDKGPKETGDQGQNS |
| | | YKALEEYRELTWYIEVKNNDQSYNAYKNLLQLIYYHAFLPEVREN |
| | | EALITDFINRTKEWNRKETEERLNTKNNKKHKNFDENDDITVNTY |
| | | RYESIPDYQGESLDDYLKVLQRKQMARAKEVNEKEEGNNNYIQFI |
| | | RDVVVWAFGAYLENKLKNYKNELQPPLSKENIGLNDTLKELFPEE |
| | | KVKSPFNIKCRFSISTFIDNKGKSTDNTSAEAVKTDGKEDEKDKKNI |
| | | KRKDLLCFYLFLRLLDENEICKLQHQFIKYRCSLKERRFPGNRTKL |
| | | EKETELLAELEELMELVRFTMPSIPEISAKAESGYDTMIKKYFKDFI |
| | | EKKVFKNPKTSNLYYHSDSKTPVTRKYMALLMRSAPLHLYKDIFK |
| | | GYYLITKKECLEYIKLSNIIKDYQNSLNELHEQLERIKLKSEKQNGK |
| | | DSLYLDKKDFYKVKEYVENLEQVARYKHLQHKINFESLYRIFRIH |
| | | VDIAARMVGYTQDWERDMHFLFKALVYNGVLEERRFEAIFNNND |
| | | DNNDGRIVKKIQNNLNNKNRELVSMLCWNKKLNKNEFGAIIWKR |
| | | NPIAHLNHFTQTEQNSKSSLESLINSLRILLAYDRKRQNAVTKTIND |
| | | LLLNDYHIRIKWEGRVDEGQIYFNIKEKEDIENEPIIHLKHLHKKDC |
| | | YIYKNSYMFDKQKEWICNGIKEEVYDKSILKCIGNLFKFDYEDKN |
| | | KSSANPKHT |
| C2-19 | [Eubacterium] | MLRRDKEVKKLYNVFNQIQVGTKPKKWNNDEKLSPEENERRAQQ |
| | rectale | KNIKMKNYKWREACSKYVESSQRIINDVIFYSYRKAKNKLRYMRK |
| | (SEQ ID | NEDILKKMQEAEKLSKFSGGKLEDFVAYTLRKSLVVSKYDTQEFD |
| | No. 56) | SLAAMVVFLECIGKNNISDHEREIVCKLLELIRKDFSKLDPNVKGS |
| | | QGANIVRSVRNQNMIVQPQGDRFLFPQVYAKENETVTNKNVEKE |
| | | GLNEFLLNYANLDDEKRAESLRKLRRILDVYFSAPNHYEKDMDIT |
| | | LSDNIEKEKFNVWEKHECGKKETGLFVDIPDVLMEAEAENIKLDA |
| | | VVEKRERKVLNDRVRKQNIICYRYTRAVVEKYNSNEPLFFENNAI |
| | | NQYWIFIHIENAVERILKNCKAGKLFKLRKGYLAEKVWKDAINLISI |
| | | KYIALGKAVYNFALDDIWKDKKNKELGIVDERIRNGITSFDYEMIK |
| | | AHENLQRELAVDIAFSVNNLARAVCDMSNLGNKESDFLLWKRND |
| | | IADKLKNKDDMASVSAVLQFFGGKSSWDINIFKDAYKGKKKYNY |
| | | EVRFIDDLRKAIYCARNENFHFKTALVNDEKWNTELFGKIFERETE |
| | | FCLNVEKDRFYSNNLYMFYQVSELRNMLDHLYSRSVSRAAQVPS |
| | | YNSVIVRTAFPEYITNVLGYQKPSYDADTLGKWYSACYYLLKEIY |
| | | YNSFLQSDRALQLFEKSVKTLSWDDKKQQRAVDNFKDHFSDIKSA |
| | | CTSLAQVCQIYMTEYNQQNNQIKKVRSSNDSIFDQPVYQHYKVLL |
| | | KKAIANAFADYLKNNKDLFGFIGKPFKANEIREIDKEQFLPDWTSR |
| | | KYEALCIEVSGSQELQKWYIVGKFLNARSLNLMVGSMRSYIQYVT |
| | | DIKRRAASIGNELHVSVHDVEKVEKWVQVIEVCSLLASRTSNQFE |
| | | DYFNDKDDYARYLKSYVDFSNVDMPSEYSALVDFSNEEQSDLYV |
| | | DPKNPKVNRNIVHSKLFAADHILRDIVEPVSKDNIEEFYSQKAEIAY |
| | | CKIKGKEITAEEQKAVLKYQKLKNRVELRDIVEYGEIINELLGQLIN |
| | | WSFMRERDLLYFQLGFHYDCLRNDSKKPEGYKNIKVDENSIKDAI |
| | | LYQIIGMYVNGVTVYAPEKDGDKLKEQCVKGGVGVKVSAFHRYS |
| | | KYLGLNEKTLYNAGLEIFEVVAEHEDIINLRNGIDHFKYYLGDYRS |
| | | MLSIYSEVFDRFFTYDIKYQKNVLNLLQNILLRHNVIVEPILESGFK |
| | | TIGEQTKPGAKLSIRSIKSDTFQYKVKGGTLITDAKDERYLETIRKIL |
| | | YYAENEEDNLKKSVVVTNADKYEKNKESDDQNKQKEKKNKDNK |
| | | GKKNEETKSDAEKNNNERLSYNPFANLNFKLSN |
| C2-20 | Eubacteriaceae | MKISKESHKRTAVAVMEDRVGGVVYVPGGSGIDLSNNLKKRSMD |
| | bacterium | TKSLYNVFNQIQAGTAPSEYEWKDYLSEAENKKREAQKMIQKAN |
| | CHKCI004 | YELRRECEDYAKKANLAVSRIIFSKKPKKIFSDDDIISHMKKQRLSK |
| | (SEQ ID | FKGRMEDFVLIALRKSLVVSTYNQEVFDSRKAATVFLKNIGKKNIS |
| | No. 57) | ADDERQIKQLMALIREDYDKWNPDKDSSDKKESSGTKVIRSIEHQ |
| | | NMVIQPEKNKLSLSKISNVGKKTKTKQKEKAGLDAFLKEYAQIDE |
| | | NSRMEYLKKLRRLLDTYFAAPSSYIKGAAVSLPENINFSSELNVWE |
| | | RHEAAKKVNINFVEIPESLLNAEQNNNKINKVEQEHSLEQLRTDIR |
| | | RRNITCYHFANALAADERYHTLFFENMAMNQFWIFIHMENAVERI |
| | | LKKCNVGTLFKLRIGYLSEKVWKDMLNLLSIKYIALGKAVYHFAL |
| | | DDIWKADIWKDASDKNSGKINDLTLKGISSFDYEMVKAQEDLQRE |
| | | MAVGVAFSTNNLARVTCKMDDLSDAESDFLLWNKEAIRRHVKYT |
| | | EKGEILSAILQFFGGRSLWDESLFEKAYSDSNYELKFLDDLKRAIY |
| | | AARNETFHFKTAAIDGGSWNTRLFGSLFEKEAGLCLNVEKNKFYS |
| | | NNLVLFYKQEDLRVFLDKLYGKECSRAAQIPSYNTILPRKSFSDFM |
| | | KQLLGLKEPVYGSAILDQWYSACYYLFKEVYYNLFLQDSSAKALF |
| | | EKAVKALKGADKKQEKAVESFRKRYWEISKNASLAEICQSYITEY |
| | | NQQNNKERKVRSANDGMFNEPIYQHYKMLLKEALKMAFASYIKN |
| | | DKELKFVYKPTEKLFEVSQDNFLPNWNSEKYNTLISEVKNSPDLQ |
| | | KWYIVGKFMNARMLNLLLGSMRSYLQYVSDIQKRAAGLGENQLH |
| | | LSAENVGQVKKWIQVLEVCLLLSVRISDKFTDYFKDEEEYASYLK |
| | | EYVDFEDSAMPSDYSALLAFSNEGKIDLYVDASNPKVNRNIIQAKL |
| | | YAPDMVLKKVVKKISQDECKEFNEKKEQIMQFKNKGDEVSWEEQ |
| | | QKILEYQKLKNRVELRDLSEYGELINELLGQLINWSYLRERDLLYF |
| | | QLGFHYSCLMNESKKPDAYKTIRRGTVSIENAVLYQIIAMYINGFP |
| | | VYAPEKGELKPQCKTGSAGQKIRAFCQWASMVEKKKYELYNAGL |
| | | ELFEVVKEHDNIIDLRNKIDHFKYYQGNDSILALYGEIFDRFFTYD |
| | | MKYRNNVLNHLQNILLRHNVIIKPIISKDKKEVGRGKMKDRAAFL |
| | | LEEVSSDRFTYKVKEGERKIDAKNRLYLETVRDILYFPNRAVNDK |
| | | GEDVIICSKKAQDLNEKKADRDKNHDKSKDTNQKKEGKNQEEKS |
| | | ENKEPYSDRMTWKPFAGIKLE |
| C2-21 | Blautia sp. | MKISKVDHVKSGIDQKLSSQRGMLYKQPQKKYEGKQLEEHVRNL |
| | Marseille- | SRKAKALYQVFPVSGNSKMEKELQIINSFIKNILLRLDSGKTSEEIV |
| | P2398 | GYINTYSVASQISGDHIQELVDQHLKESLRKYTCVGDKRIYVPDIIV |
| | (SEQ ID | ALLKSKFNSETLQYDNSELKILIDFIREDYLKEKQIKQIVHSIENNST |
| | No. 58) | PLRIAEINGQKRLIPANVDNPKKSYIFEFLKEYAQSDPKGQESLLQH |
| | | MRYLILLYLYGPDKITDDYCEEIEAWNFGSIVMDNEQLFSEEASML |
| | | IQDRIYVNQQIEEGRQSKDTAKVKKNKSKYRMLGDKIEHSINESVV |
| | | KHYQEACKAVEEKDIPWIKYISDHVMSVYSSKNRVDLDKLSLPYL |
| | | AKNTWNTWISFIAMKYVDMGKGVYHFAMSDVDKVGKQDNLIIG |
| | | QIDPKFSDGISSFDYERIKAEDDLHRSMSGYIAFAVNNFARAICSDE |
| | | FRKKNRKEDVLTVGLDEIPLYDNVKRKLLQYFGGASNWDDSIIDII |
| | | DDKDLVACIKENLYVARNVNFHFAGSEKVQKKQDDILEEIVRKET |
| | | RDIGKHYRKVFYSNNVAVFYCDEDIIKLMNHLYQREKPYQAQIPS |
| | | YNKVISKTYLPDLIFMLLKGKNRTKISDPSIMNMFRGTFYFLLKEIY |
| | | YNDFLQASNLKEMFCEGLKNNVKNKKSEKPYQNFMRRFEELENM |
| | | GMDFGEICQQIMTDYEQQNKQKKKTATAVMSEKDKKIRTLDNDT |
| | | QKYKHFRTLLYIGLREAFIIYLKDEKNKEWYEFLREPVKREQPEEK |
| | | EFVNKWKLNQYSDCSELILKDSLAAAWYVVAHFINQAQLNHLIGD |
| | | IKNYIQFISDIDRRAKSTGNPVSESTEIQIERYRKILRVLEFAKFFCGQ |
| | | ITNVLTDYYQDENDFSTHVGHYVKFEKKNMEPAHALQAFSNSLY |
| | | ACGKEKKKAGFYYDGMNPIVNRNITLASMYGNKKLLENAMNPVT |
| | | EQDIRKYYSLMAELDSVLKNGAVCKSEDEQKNLRHFQNLKNRIEL |
| | | VDVLTLSELVNDLVAQLIGWVYIRERDMMYLQLGLHYIKLYFTDS |
| | | VAEDSYLRTLDLEEGSIADGAVLYQIASLYSFNLPMYVKPNKSSVY |
| | | CKKHVNSVATKFDIFEKEYCNGDETVIENGLRLFENINLHKDMVK |
| | | FRDYLAHFKYFAKLDESILELYSKAYDFFFSYNIKLKKSVSYVLTN |
| | | VLLSYFINAKLSFSTYKSSGNKTVQHRTTKISVVAQTDYFTYKLRSI |
| | | VKNKNGVESIENDDRRCEVVNIAARDKEFVDEVCNVINYNSDK |
| C2-22 | Leptotrichia | MGNLFGHKRWYEVRDKKDFKIKRKVKVKRNYDGNKYILNINENN |
| | sp. oral | NKEKIDNNKFIGEFVNYKKNNNVLKEFKRKFHAGNILFKLKGKEEI |
| | taxon 879 | IRIENNDDFLETEEVVLYIEVYGKSEKLKALEITKKKIIDEAIRQGIT |
| | str. F0557 | KDDKKIEIKRQENEEEIEIDIRDEYTNKTLNDCSIILRIIENDELETKK |
| | (SEQ ID | SIYEIFKNINMSLYKIIEKIIENETEKVFENRYYEEHLREKLLKDNKI |
| | No. 59) | DVILTNFMEIREKIKSNLEIMGFVKFYLNVSGDKKKSENKKMFVEK |
| | | ILNTNVDLTVEDIVDFIVKELKFWNITKRIEKVKKFNNEFLENRRNR |
| | | TYIKSYVLLDKHEKFKIERENKKDKIVKFFVENIKNNSIKEKIEKILA |
| | | EFKINELIKKLEKELKKGNCDTEIFGIFKKHYKVNFDSKKFSNKSDE |
| | | EKELYKIIYRYLKGRIEKILVNEQKVRLKKMEKIEIEKILNESILSEKI |
| | | LKRVKQYTLEHIMYLGKLRHNDIVKMTVNTDDFSRLHAKEELDLE |
| | | LITFFASTNMELNKIFNGKEKVTDFFGFNLNGQKITLKEKVPSFKLN |
| | | ILKKLNFINNENNIDEKLSHFYSFQKEGYLLRNKILHNSYGNIQETK |
| | | NLKGEYENVEKLIKELKVSDEEISKSLSLDVIFEGKVDIINKINSLKI |
| | | GEYKDKKYLPSFSKIVLEITRKFREINKDKLFDIESEKIILNAVKYVN |
| | | KILYEKITSNEENEFLKTLPDKLVKKSNNKKENKNLLSIEEYYKNA |
| | | QVSSSKGDKKAIKKYQNKVTNAYLEYLENTFTEIIDFSKFNLNYDE |
| | | IKTKIEERKDNKSKIIIDSISTNINITNDIEYIISIFALLNSNTYINKIRNR |
| | | FFATSVWLEKQNGTKEYDYENIISILDEVLLINLLRENNITDILDLK |
| | | NAIIDAKIVENDETYIKNYIFESNEEKLKKRLFCEELVDKEDIRKIFE |
| | | DENFKFKSFIKKNEIGNFKINFGILSNLECNSEVEAKKIIGKNSKKLE |
| | | SFIQNIIDEYKSNIRTLFSSEFLEKYKEEIDNLVEDTESENKNKFEKIY |
| | | YPKEHKNELYIYKKNLFLNIGNPNFDKIYGLISKDIKNVDTKILFDD |
| | | DIKKNKISEIDAILKNLNDKLNGYSNDYKAKYVNKLKENDDFFAK |
| | | NIQNENYSSFGEFEKDYNKVSEYKKIRDLVEFNYLNKIESYLIDINW |
| | | KLAIQMARFERDMHYIVNGLRELGIIKLSGYNTGISRAYPKRNGSD |
| | | GFYTTTAYYKFFDEESYKKFEKICYGFGIDLSENSEINKPENESIRN |
| | | YISHFYIVRNPFADYSIAEQIDRVSNLLSYSTRYNNSTYASVFEVFK |
| | | KDVNLDYDELKKKFRLIGNNDILERLMKPKKVSVLELESYNSDYI |
| | | KNLIIELLTKIENTNDTL |
| C2-23 | Lachnospiraceae | MKISKVDHTRMAVAKGNQHRRDEISGILYKDPTKTGSIDFDERFK |
| | bacterium | KLNCSAKILYHVFNGIAEGSNKYKNIVDKVNNNLDRVLFTGKSYD |
| | NK4A144 | RKSIIDIDTVLRNVEKINAFDRISTEEREQIIDDLLEIQLRKGLRKGK |
| | (SEQ ID | AGLREVLLIGAGVIVRTDKKQEIADFLEILDEDFNKTNQAKNIKLSI |
| | No. 60) | ENQGLVVSPVSRGEERIFDVSGAQKGKSSKKAQEKEALSAFLLDY |
| | | ADLDKNVRFEYLRKIRRLINLYFYVKNDDVMSLTEIPAEVNLEKDF |
| | | DIWRDHEQRKEENGDFVGCPDILLADRDVKKSNSKQVKIAERQLR |
| | | ESIREKNIKRYRFSIKTIEKDDGTYFFANKQISVFWIHRIENAVERIL |
| | | GSINDKKLYRLRLGYLGEKVWKDILNFLSIKYIAVGKAVFNFAMD |
| | | DLQEKDRDIEPGKISENAVNGLTSFDYEQIKADEMLQREVAVNVA |
| | | FAANNLARVTVDIPQNGEKEDILLWNKSDIKKYKKNSKKGILKSIL |
| | | QFFGGASTWNMKMFEIAYHDQPGDYEENYLYDIIQIIYSLRNKSFH |
| | | FKTYDHGDKNWNRELIGKMIEHDAERVISVEREKFHSNNLPMFYK |
| | | DADLKKILDLLYSDYAGRASQVPAFNTVLVRKNFPEFLRKDMGY |
| | | KVHFNNPEVENQWHSAVYYLYKEIYYNLFLRDKEVKNLFYTSLK |
| | | NIRSEVSDKKQKLASDDFASRCEEIEDRSLPEICQIIMTEYNAQNFG |
| | | NRKVKSQRVIEKNKDIFRHYKMLLIKTLAGAFSLYLKQERFAFIGK |
| | | ATPIPYETTDVKNFLPEWKSGMYASFVEEIKNNLDLQEWYIVGRFL |
| | | NGRMLNQLAGSLRSYIQYAEDIERRAAENRNKLFSKPDEKIEACK |
| | | KAVRVLDLCIKISTRISAEFTDYFDSEDDYADYLEKYLKYQDDAIK |
| | | ELSGSSYAALDHFCNKDDLKFDIYVNAGQKPILQRNIVMAKLFGP |
| | | DNILSEVMEKVTESAIREYYDYLKKVSGYRVRGKCSTEKEQEDLL |
| | | KFQRLKNAVEFRDVTEYAEVINELLGQLISWSYLRERDLLYFQLGF |
| | | HYMCLKNKSFKPAEYVDIRRNNGTIIHNAILYQIVSMYINGLDFYS |
| | | CDKEGKTLKPIETGKGVGSKIGQFIKYSQYLYNDPSYKLEIYNAGL |
| | | EVFENIDEHDNITDLRKYVDHFKYYAYGNKMSLLDLYSEFFDRFF |
| | | TYDMKYQKNVVNVLENILLRHFVIFYPKFGSGKKDVGIRDCKKER |
| | | AQIEISEQSLTSEDFMFKLDDKAGEEAKKFPARDERYLQTIAKLLY |
| | | YPNEIEDMNRFMKKGETINKKVQFNRKKKITRKQKNNSSNEVLSS |
| | | TMGYLFKNIKL |
| C2-24 | Chloroflexus | MTDQVRREEVAAGELADTPLAAAQTPAADAAVAATPAPAEAVAP |
| | aggregans | TPEQAVDQPATTGESEAPVTTAQAAAHEAEPAEATGASFTPVSEQ |
| | (SEQ ID | QPQKPRRLKDLQPGMELEGKVTSIALYGIFVDVGVGRDGLVHISE |
| | No. 61) | MSDRRIDTPSELVQIGDTVKVWVKSVDLDARRISLTMLNPSRGEKP |
| | | RRSRQSQPAQPQPRRQEVDREKLASLKVGEIVEGVITGFAPFGAFA |
| | | DIGVGKDGLIHISELSEGRVEKPEDAVKVGERYQFKVLEIDGEGTRI |
| | | SLSLRRAQRTQRMQQLEPGQIIEGTVSGIATFGAFVDIGVGRDGLV |
| | | HISALAPHRVAKVEDVVKVGDKVKVKVLGVDPQSKRISLTMRLEE |
| | | EQPATTAGDEAAEPAEEVTPTRRGNLERFAAAAQTARERSERGER |
| | | SERGERRERRERRPAQSSPDTYIVGEDDDESFEGNATIEDLLTKFGG |
| | | SSSRRDRDRRRRHEDDDDEEMERPSNRRQREAIRRTLQQIGYDE |
| C2-25 | Demequina | MDLTWHALLILFIVALLAGFLDTLAGGGGLLTVPALLLTGIPPLQA |
| | aurantiaca | LGTNKLQSSFGTGMATYQVIRKKRVHWRDVRWPMVWAFLGSAA |
| | (SEQ ID | GAVAVQFIDTDALLIIIPVVLALVAAYFLFVPKSHLPPPEPRMSDPA |
| | No. 62) | YEATLVPIIGAYDGAFGPGTGSLYALSGVALRAKTLVQSTAIAKTL |
| | | NFATNFAALLVFAFAGHMLWTVGAVMIAGQLIGAYAGSHMLFRV |
| | | NPLVLRVLIVVMSLGMLIRVLLD |
| C2-26 | Thalassospira | MRIIKPYGRSHVEGVATQEPRRKLRLNSSPDISRDIPGFAQSHDALII |
| | sp. TSL5-1 | AQWISAIDKIATKPKPDKKPTQAQINLRTTLGDAAWQHVMAENLL |
| | (SEQ ID | PAATDPAIREKLHLIWQSKIAPWGTARPQAEKDGKPTPKGGWYER |
| | No. 63) | FCGVLSPEAITQNVARQIAKDIYDHLHVAAKRKGREPAKQGESSN |
| | | KPGKFKPDRKRGLIEERAESIAKNALRPGSHAPCPWGPDDQATYE |
| | | QAGDVAGQIYAAARDCLEEKKRRSGNRNTSSVQYLPRDLAAKILY |
| | | AQYGRVFGPDTTIKAALDEQPSLFALHKAIKDCYHRLINDARKRDI |
| | | LRILPRNMAALFRLVRAQYDNRDINALIRLGKVIHYHASEQGKSEH |
| | | HGIRDYWPSQQDIQNSRFWGSDGQADIKRHEAFSRIWRHIIALASR |
| | | TLHDWADPHSQKFSGENDDILLLAKDAIEDDVFKAGHYERKCDVL |
| | | FGAQASLFCGAEDFEKAILKQAITGTGNLRNATFHFKGKVRFEKEL |
| | | QELTKDVPVEVQSAIAALWQKDAEGRTRQIAETLQAVLAGHFLTE |
| | | EQNRHIFAALTAAMAQPGDVPLPRLRRVLARHDSICQRGRILPLSP |
| | | CPDRAKLEESPALTCQYTVLKMLYDGPFRAWLAQQNSTILNHYID |
| | | STIARTDKAARDMNGRKLAQAEKDLITSRAADLPRLSVDEKMGDF |
| | | LARLTAATATEMRVQRGYQSDGENAQKQAAFIGQFECDVIGRAF |
| | | ADFLNQSGFDFVLKLKADTPQPDAAQCDVTALIAPDDISVSPPQA |
| | | WQQVLYFILHLVPVDDASHLLHQIRKWQVLEGKEKPAQIAHDVQS |
| | | VLMLYLDMHDAKFTGGAALHGIEKFAEFFAHAADFRAVFPPQSLQ |
| | | DQDRSIPRRGLREIVRFGHLPLLQHMSGTVQITHDNVVAWQAART |
| | | AGATGMSPIARRQKQREELHALAVERTARFRNADLQNYMHALVD |
| | | VIKHRQLSAQVTLSDQVRLHRLMMGVLGRLVDYAGLWERDLYF |
| | | VVLALLYHEIGATPDDVFKGQGKKNLADGQVVAALKPKNRKAAA |
| | | PVGVFDDLDHYGIYQDDRQSIRNGLSHFNMLRGGKAPDLSHWVN |
| | | QTRSLVAHDRKLKNAVAKSVIEMLAREGFDLDWGIQTDRGQHILS |
| | | HGKIRTRQAQHFQKSRLHIVKKSAKPDKNDTVKIRENLHGDAMVE |
| | | RVVQLFAAQVQKRYDITVEKRLDHLFLKPQDQKGKNGIHTHNGW |
| | | SKTEKKRRPSRENRKGNHEN |
| C2-27 | SAMN04487830_ | MKFSKESHRKTAVGVTESNGIIGLLYKDPLNEKEKIEDVVNQRANS |
| | 13920 | TKRLFNLFGTEATSKDISRASKDLAKVVNKAIGNLKGNKKFNKKE |
| | [Pseudo- | KTKQAVKMILTAVLIENTNLSKEDEAFVHEYFVKKLVNEYNKTSV |
| | butyrivibrio | KKQIPVALSNQNMVIQPNSVNGTLEISETKKSKETKTTEKDAFRAF |
| | sp. OR37] | LRDYATLDENRRHKMRLCLRNLVNLYFYGETSVSKDDFDEWRDH |
| | (SEQ ID | EDKKQNDELFVKKIVSIKTDRKGNVKEVLDVDATIDAIRTNNIACY |
| | No. 64) | RRALAYANENPDVFFSDTMLNKFWIFIEIVENEVERIYGHINNNTGD |
| | | YKYQLGYLSEKVWKGIINYLSIKYIAEGKAVYNYAMNALAKDNN |
| | | SNAFGKLDEKFVNGITSFEYERIKAEETLQRECAVNIAFAANHLAN |
| | | ATVDLNEKDSDFLLLKHEDNKDTLGAVARPNILRNILQFFGGKSR |
| | | WNDFDFSGIDEIQLLDDLRKMIYSLRNSSFHFKTENIDNDSWNTKLI |
| | | GDMFAYDFNMAGNVQKDKMYSNNVPMFYSTSDIEKMLDRLYAE |
| | | VHERASQVPSFNSVFVRKNFPDYLKNDLKITSAFGVDDALKWQSA |
| | | VYYVCKEIYYNDFLQNPETFTMLKDYVQCLPIDIDKSMDQKLKSE |
| | | RNAHKNFKEAFATYCKECDSLSAICQMIMTEYNNQNKGNRKVISA |
| | | RTKDGDKLIYKHYKMILFEALKNVFTIYLEKNINTYGFLKKPKLIN |
| | | NVPAIEEFLPNYNGRQYETLVNRITEETELQKWYIVGRLLNPKQVN |
| | | QLIGNFRSYVQYVNDVARRAKQTGNNLSNDNIAWDVKNIIQIFDV |
| | | CTKLNGVTSNILEDYFDDGDDYARYLKNFVDYTNKNNDHSATLL |
| | | GDFCAKEIDGIKIGIYHDGTNPIVNRNIIQCKLYGATGIISDLTKDGSI |
| | | LSVDYEIIKKYMQMQKEIKVYQQKGICKTKEEQQNLKKYQELKNI |
| | | VELRNIIDYSEILDELQGQLINWGYLRERDLMYFQLGFHYLCLHNE |
| | | SKKPVGYNNAGDISGAVLYQIVAMYTNGLSLIDANGKSKKNAKA |
| | | SAGAKVGSFCSYSKEIRGVDKDTKEDDDPIYLAGVELFENINEHQQ |
| | | CINLRNYIEHFHYYAKHDRSMLDLYSEVFDRFFTYDMKYTKNVPN |
| | | MMYNILLQHLVVPAFEFGSSEKRLDDNDEQTKPRAMFTLREKNGL |
| | | SSEQFTYRLGDGNSTVKLSARGDDYLRAVASLLYYPDRAPEGLIR |
| | | DAEAEDKFAKINHSNPKSDNRNNRGNFKNPKVQWYNNKTKRK |
| C2-28 | SAMN02910398_ | MKISKVDHRKTAVKITDNKGAEGFIYQDPTRDSSTMEQIISNRARS |
| | 00008 | SKVLFNIFGDTKKSKDLNKYTESLIIYVNKAIKSLKGDKRNNKYEEI |
| | [Butyri- | TESLKTERVLNALIQAGNEFTCSENNIEDALNKYLKKSFRVGNTKS |
| | vibrio sp. | ALKKLLMAAYCGYKLSIEEKEEIQNYFVDKLVKEYNKDTVLKYT |
| | YAB3001] | AKSLKHQNMVVQPDTDNHVFLPSRIAGATQNKMSEKEALTEFLK |
| | (SEQ ID | AYAVLDEEKRHNLRIILRKLVNLYFYESPDFIYPENNEWKEHDDRK |
| | No. 65) | NKTETFVSPVKVNEEKNGKTFVKIDVPATKDLIRLKNIECYRRSVA |
| | | ETAGNPITYFTDHNISKFWIHHIENEVEKIFALLKSNWKDYQFSVG |
| | | YISEKVWKEIINYLSIKYIAIGKAVYNYALEDIKKNDGTLNFGVIDP |
| | | SFYDGINSFEYEKIKAEETFQREVAVYVSFAVNHLSSATVKLSEAQ |
| | | SDMLVLNKNDIEKIAYGNTKRNILQFFGGQSKWKEFDFDRYINPV |
| | | NYTDIDFLFDIKKMVYSLRNESFHFTTTDTESDWNKNLISAMFEYE |
| | | CRRISTVQKNKFFSNNLPLFYGENSLERVLHKLYDDYVDRMSQVP |
| | | SFGNVFVRKKFPDYMKEIGIKHNLSSEDNLKLQGALYFLYKEIYYN |
| | | AFISSEKAMKIFVDLVNKLDTNARDDKGRITHEAMAHKNFKDAIS |
| | | HYMTHDCSLADICQKIMTEYNQQNTGHRKKQTTYSSEKNPEIFRH |
| | | YKMILFMLLQKAMTEYISSEEIFDFIMKPNSPKTDIKEEEFLPQYKS |
| | | CAYDNLIKLIADNVELQKWYITARLLSPREVNQLIGSFRSYKQFVS |
| | | DIERRAKETNNSLSKSGMTVDVENITKVLDLCTKLNGRFSNELTDY |
| | | FDSKDDYAVYVSKFLDFGFKIDEKFPAALLGEFCNKEENGKKIGIY |
| | | HNGTEPILNSNIIKSKLYGITDVVSRAVKPVSEKLIREYLQQEVKIKP |
| | | YLENGVCKNKEEQAALRKYQELKNRIEFRDIVEYSEIINELMGQLI |
| | | NFSYLRERDLMYFQLGFHYLCLNNYGAKPEGYYSIVNDKRTIKGA |
| | | ILYQIVAMYTYGLPIYHYVDGTISDRRKNKKTVLDTLNSSETVGAK |
| | | IKYFIYYSDELFNDSLILYNAGLELFENINEHENIVNLRKYIDHFKY |
| | | YVSQDRSLLDIYSEVFDRYFTYDRKYKKNVMNLFSNIMLKHFIITD |
| | | FEFSTGEKTIGEKNTAKKECAKVRIKRGGLSSDKFTYKFKDAKPIE |
| | | LSAKNTEFLDGVARILYYPENVVLTDLVRNSEVEDEKRIEKYDRN |
| | | HNSSPTRKDKTYKQDVKKNYNKKTSKAFDSSKLDTKSVGNNLSD |
| | | NPVLKQFLSESKKKR |
| C2-29 | Blautia sp. | MKISKVDHVKSGIDQKLSSQRGMLYKQPQKKYEGKQLEEHVRNL |
| | Marseille- | SRKAKALYQVFPVSGNSKMEKELQIINSFIKNILLRLDSGKTSEEIV |
| | P2398 | GYINTYSVASQISGDHIQELVDQHLKESLRKYTCVGDKRIYVPDIIV |
| | (SEQ ID | ALLKSKFNSETLQYDNSELKILIDFIREDYLKEKQIKQIVHSIENNST |
| | No. 66) | PLRIAEINGQKRLIPANVDNPKKSYIFEFLKEYAQSDPKGQESLLQH |
| | | MRYLILLYLYGPDKITDDYCEEIEAWNFGSIVMDNEQLFSEEASML |
| | | IQDRIYVNQQIEEGRQSKDTAKVKKNKSKYRMLGDKIEHSINESVV |
| | | KHYQEACKAVEEKDIPWIKYISDHVMSVYSSKNRVDLDKLSLPYL |
| | | AKNTWNTWISFIAMKYVDMGKGVYHFAMSDVDKVGKQDNLIIG |
| | | QIDPKFSDGISSFDYERIKAEDDLHRSMSGYIAFAVNNFARAICSDE |
| | | FRKKNRKEDVLTVGLDEIPLYDNVKRKLLQYFGGASNWDDSIIDII |
| | | DDKDLVACIKENLYVARNVNFHFAGSEKVQKKQDDILEEIVRKET |
| | | RDIGKHYRKVFYSNNVAVFYCDEDIIKLMNHLYQREKPYQAQIPS |
| | | YNKVISKTYLPDLIFMLLKGKNRTKISDPSIMNMFRGTFYFLLKEIY |
| | | YNDFLQASNLKEMFCEGLKNNVKNKKSEKPYQNFMRRFEELENM |
| | | GMDFGEICQQIMTDYEQQNKQKKKTATAVMSEKDKKIRTLDNDT |
| | | QKYKHFRTLLYIGLREAFIIYLKDEKNKEWYEFLREPVKREQPEEK |
| | | EFVNKWKLNQYSDCSELILKDSLAAAWYVVAHFINQAQLNHLIGD |
| | | IKNYIQFISDIDRRAKSTGNPVSESTEIQIERYRKILRVLEFAKFFCGQ |
| | | ITNVLTDYYQDENDFSTHVGHYVKFEKKNMEPAHALQAFSNSLY |
| | | ACGKEKKKAGFYYDGMNPIVNRNITLASMYGNKKLLENAMNPVT |
| | | EQDIRKYYSLMAELDSVLKNGAVCKSEDEQKNLRHFQNLKNRIEL |
| | | VDVLTLSELVNDLVAQLIGWVYIRERDMMYLQLGLHYIKLYFTDS |
| | | VAEDSYLRTLDLEEGSIADGAVLYQIASLYSFNLPMYVKPNKSSVY |
| | | CKKHVNSVATKFDIFEKEYCNGDETVIENGLRLFENINLHKDMVK |
| | | FRDYLAHFKYFAKLDESILELYSKAYDFFFSYNIKLKKSVSYVLTN |
| | | VLLSYFINAKLSFSTYKSSGNKTVQHRTTKISVVAQTDYFTYKLRSI |
| | | VKNKNGVESIENDDRRCEVVNIAARDKEFVDEVCNVINYNSDK |
| C2-30 | Leptotrichia | MKITKIDGISHKKYIKEGKLVKSTSEENKTDERLSELLTIRLDTYIK |
| | sp. | NPDNASEEENRIRRENLKEFFSNKVLYLKDGILYLKDRREKNQLQN |
| | Marseille- | KNYSEEDISEYDLKNKNNFLVLKKILLNEDINSEELEIFRNDFEKKL |
| | P3007 | DKINSLKYSLEENKANYQKINENNIKKVEGKSKRNIFYNYYKDSA |
| | (SEQ ID | KRNDYINNIQEAFDKLYKKEDIENLFFLIENSKKHEKYKIRECYHKI |
| | No. 67) | IGRKNDKENFATIIYEEIQNVNNMKELIEKVPNVSELKKSQVFYKY |
| | | YLNKEKLNDENIKYVFCHFVEIEMSKLLKNYVYKKPSNISNDKVK |
| | | RIFEYQSLKKLIENKLLNKLDTYVRNCGKYSFYLQDGEIATSDFIVG |
| | | NRQNEAFLRNIIGVSSTAYFSLRNILETENENDITGRMRGKTVKNN |
| | | KGEEKYISGEIDKLYDNNKQNEVKKNLKMFYSYDFNMNSKKEIED |
| | | FFSNIDEAISSIRHGIVHFNLELEGKDIFTFKNIVPSQISKKMFHDEIN |
| | | EKKLKLKIFKQLNSANVFRYLEKYKILNYLNRTRFEFVNKNIPFVPS |
| | | FTKLYSRIDDLKNSLGIYWKTPKTNDDNKTKEITDAQIYLLKNIYY |
| | | GEFLNYFMSNNGNFFEITKEIIELNKNDKRNLKTGFYKLQKFENLQ |
| | | EKTPKEYLANIQSLYMINAGNQDEEEKDTYIDFIQKIFLKGFMTYL |
| | | ANNGRLSLIYIGSDEETNTSLAEKKQEFDKFLKKYEQNNNIEIPYEI |
| | | NEFVREIKLGKILKYTERLNMFYLILKLLNHKELTNLKGSLEKYQS |
| | | ANKEEAFSDQLELINLLNLDNNRVTEDFELEADEIGKFLDFNGNKV |
| | | KDNKELKKFDTNKIYFDGENIIKHRAFYNIKKYGMLNLLEKISDEA |
| | | KYKISIEELKNYSKKKNEIEENHTTQENLHRKYARPRKDEKFTDED |
| | | YKKYEKAIRNIQQYTHLKNKVEFNELNLLQSLLLRILHRLVGYTSI |
| | | WERDLRFRLKGEFPENQYIEEIFNFDNSKNVKYKNGQIVEKYINFY |
| | | KELYKDDTEKISIYSDKKVKELKKEKKDLYIRNYIAHFNYIPNAEIS |
| | | LLEMLENLRKLLSYDRKLKNAIMKSIVDILKEYGFVVTFKIEKDKK |
| | | IRIESLKSEEVVHLKKLKLKDNDKKKEPIKTYRNSKELCKLVKVMF |
| | | EYKMKEKKSEN |
| C2-31 | Bacteroides | MRITKVKVKESSDQKDKMVLIHRKVGEGTLVLDENLADLTAPIID |
| | ihuae | KYKDKSFELSLLKQTLVSEKEMNIPKCDKCTAKERCLSCKQREKR |
| | (SEQ ID | LKEVRGAIEKTIGAVIAGRDIIPRLNIFNEDEICWLIKPKLRNEFTFK |
| | No. 68) | DVNKQVVKLNLPKVLVEYSKKNDPTLFLAYQQWIAAYLKNKKG |
| | | HIKKSILNNRVVIDYSDESKLSKRKQALELWGEEYETNQRIALESY |
| | | HTSYNIGELVTLLPNPEEYVSDKGEIRPAFHYKLKNVLQMHQSTVF |
| | | GTNEILCINPIFNENRANIQLSAYNLEVVKYFEHYFPIKKKKKNLSL |
| | | NQAIYYLKVETLKERLSLQLENALRMNLLQKGKIKKHEFDKNTCS |
| | | NTLSQIKRDEFFVLNLVEMCAFAANNIRNIVDKEQVNEILSKKDLC |
| | | NSLSKNTIDKELCTKFYGADFSQIPVAIWAMRGSVQQIRNEIVHYK |
| | | AEAIDKIFALKTFEYDDMEKDYSDTPFKQYLELSIEKIDSFFIEQLSS |
| | | NDVLNYYCTEDVNKLLNKCKLSLRRTSIPFAPGFKTIYELGCHLQD |
| | | SSNTYRIGHYLMLIGGRVANSTVTKASKAYPAYRFMLKLIYNHLF |
| | | LNKFLDNHNKRFFMKAVAFVLKDNRENARNKFQYAFKEIRMMN |
| | | NDESIASYMSYIHSLSVQEQEKKGDKNDKVRYNTEKFIEKVFVKG |
| | | FDDFLSWLGVEFILSPNQEERDKTVTREEYENLMIKDRVEHSINSN |
| | | QESHIAFFTFCKLLDANHLSDLRNEWIKFRSSGDKEGFSYNFAIDIIE |
| | | LCLLTVDRVEQRRDGYKEQTELKEYLSFFIKGNESENTVWKGFYF |
| | | QQDNYTPVLYSPIELIRKYGTLELLKLIIVDEDKITQGEFEEWQTLK |
| | | KVVEDKVTRRNELHQEWEDMKNKSSFSQEKCSIYQKLCRDIDRY |
| | | NWLDNKLHLVHLRKLHNLVIQILSRMARFIALWDRDFVLLDASRA |
| | | NDDYKLLSFFNFRDFINAKKTKTDDELLAEFGSKIEKKNAPFIKAE |
| | | DVPLMVECIEAKRSFYQKVFFRNNLQVLADRNFIAHYNYISKTAK |
| | | CSLFEMIIKLRTLMYYDRKLRNAVVKSIANVFDQNGMVLQLSLDD |
| | | SHELKVDKVISKRIVHLKNNNIMTDQVPEEYYKICRRLLEMKK |
| C2-32 | SAMN05216357_ | MEFRDSIFKSLLQKEIEKAPLCFAEKLISGGVFSYYPSERLKEFVGN |
| | 1045 | HPFSLFRKTMPFSPGFKRVMKSGGNYQNANRDGRFYDLDIGVYLP |
| | [Porphy- | KDGFGDEEWNARYFLMKLIYNQLFLPYFADAENHLFRECVDFVK |
| | romonadaceae | RVNRDYNCKNNNSEEQAFIDIRSMREDESIADYLAFIQSNIIIEENK |
| | bacterium | KKETNKEGQINFNKFLLQVFVKGFDSFLKDRTELNFLQLPELQGDG |
| | KH3CP3RA] | TRGDDLESLDKLGAVVAVDLKLDATGIDADLNENISFYTFCKLLD |
| | (SEQ ID | SNHLSRLRNEIIKYQSANSDFSHNEDFDYDRIISIIELCMLSADHVST |
| | No. 69) | NDNESIFPNNDKDFSGIRPYLSTDAKVETFEDLYVHSDAKTPITNAT |
| | | MVLNWKYGTDKLFERLMISDQDFLVTEKDYFVWKELKKDIEEKI |
| | | KLREELHSLWVNTPKGKKGAKKKNGRETTGEFSEENKKEYLEVC |
| | | REIDRYVNLDNKLHFVHLKRMHSLLIELLGRFVGFTYLFERDYQY |
| | | YHLEIRSRRNKDAGVVDKLEYNKIKDQNKYDKDDFFACTFLYEK |
| | | ANKVRNFIAHFNYLTMWNSPQEEEHNSNLSGAKNSSGRQNLKCSL |
| | | TELINELREVMSYDRKLKNAVTKAVIDLFDKHGMVIKFRIVNNNN |
| | | NDNKNKHHLELDDIVPKKIMHLRGIKLKRQDGKPIPIQTDSVDPLY |
| | | CRMWKKLLDLKPTPF |
| C2-33 | Listeria | MHDAWAENPKKPQSDAFLKEYKACCEAIDTYNWHKNKATLVYV |
| | riparia | NELHHLLIDILGRLVGYVAIADRDFQCMANQYLKSSGHTERVDSW |
| | (SEQ ID | INTIRKNRPDYIEKLDIFMNKAGLFVSEKNGRNYIAHLNYLSPKHK |
| | No. 70) | YSLLYLFEKLREMLKYDRKLKNAVTKSLIDLLDKHGMCVVFANL |
| | | KNNKHRLVIASLKPKKIETFKWKKIK |
| C2-34 | Insoli- | MRIIRPYGSSTVASPSPQDAQPLRSLQRQNGTFDVAEFSRRHPELVL |
| | tispirillum | AQWVAMLDKIIRKPAPGKNSTALPRPTAEQRRLRQQVGAALWAE |
| | peregrinum | MQRHTPVPPELKAVWDSKVHPYSKDNAPATAKTPSHRGRWYDRF |
| | (SEQ ID | GDPETSAATVAEGVRRHLLDSAQPFRANGGQPKGKGVIEHRALTI |
| | No. 71) | QNGTLLEIHHQSEKAGPLPEDWSTYRADELVSTIGKDARWIKVAAS |
| | | LYQHYGRIFGPTTPISEAQTRPEFVLHTAVKAYYRRLFKERKLPAE |
| | | RLERLLPRTGEALRHAVTVQHGNRSLADAVRIGKILHYGWLQNGE |
| | | PDPWPDDAALYSSRYWGSDGQTDIKHSEAVSRVWRRALTAAQRT |
| | | LTSWLYPAGTDAGDILLIGQKPDSIDRNRLPLLYGDSTRHWTRSPG |
| | | DVWLFLKQTLENLRNSSFHFKTLSAFTSHLDGTCESEPAEQQAAQ |
| | | ALWQDDRQQDHQQVFLSLRALDATTYLPTGPLHRIVNAVQSTDA |
| | | TLPLPRFRRVVTRAANTRLKGFPVEPVNRRTMEDDPLLRCRYGVL |
| | | KLLYERGFRAWLETRPSIASCLDQSLKRSTKAAQTINGKNSPQGVE |
| | | ILSRATKLLQAEGGGGHGIHDLFDRLYAATAREMRVQVGYHHDA |
| | | EAARQQAEFIEDLKCEVVARAFCAYLKTLGIQGDTFRRQPEPLPTW |
| | | PDLPDLPSSTIGTAQAALYSVLHLMPVEDVGSLLHQLRRWLVALQ |
| | | ARGGEDGTAITATIPLLELYLNRHDAKFSGGGAGTGLRWDDWQV |
| | | FFDCQATFDRVFPPGPALDSHRLPLRGLREVLRFGRVNDLAALIGQ |
| | | DKITAAEVDRWHTAEQTIAAQQQRREALHEQLSRKKGTDAEVDE |
| | | YRALVTAIADHRHLTAHVTLSNVVRLHRLMTTVLGRLVDYGGLW |
| | | ERDLTFVTLYEAHRLGGLRNLLSESRVNKFLDGQTPAALSKKNNA |
| | | EENGMISKVLGDKARRQIRNDFAHFNMLQQGKKTINLTDEINNAR |
| | | KLMAHDRKLKNAITRSVTTLLQQDGLDIVWTMDASHRLTDAKIDS |
| | | RNAIHLHKTHNRANIREPLHGKSYCRWVAALFGATSTPSATKKSD |
| | | KIR |

### Example 3: Characterization of C2c2 Orthologs

[1089] The Cas13c proteins were further compared to the following Cas13b proteins which were codon optimized for expression in mammalian cells.

| | | |
|---|---|---|
| Bergeyella | 1 | MENKTSLGNNIYYNPFKPQDKSYFAGYFNAAMENTDSVFRELGKRLK |
| zoohelcum | (SEQ | GKEYTSENFFDAIFKENISLVEYERYVKLLSDYFPMARLLDKKEVPIKE |
| | ID No. | RKENFKKNFKGIIKAVRDLRNFYTHKEHGEVEITDEIFGVLDEMLKST |
| | 72) | VLTVKKKKVKTDKTKEILKKSIEKQLDILCQKKLEYLRDTARKIEEKR |
| | | RNQRERGEKELVAPFKYSDKRDDLIAAIYNDAFDVYIDKKKDSLKESS |
| | | KAKYNTKSDPQQEEGDLKIPISKNGVVFLLSLFLTKQEIHAFKSKIAGF |
| | | KATVIDEATVSEATVSHGKNSICFMATHEIFSHLAYKKLKRKVRTAEI |
| | | NYGEAENAEQLSVYAKETLMMQMLDELSKVPDVVYQNLSEDVQKT |
| | | FIEDWNEYLKENNGDVGTMEEEQVIHPVIRKRYEDKFNYFAIRFLDEF |
| | | AQFPTLRFQVHLGNYLHDSRPKENLISDRRIKEKITVFGRLSELEHKKA |
| | | LFIKNTETNEDREHYWEIFPNPNYDFPKENISVNDKDFPIAGSILDREK |
| | | QPVAGKIGIKVKLLNQQYVSEVDKAVKAHQLKQRKASKPSIQNIIEEI |
| | | VPINESNPKEAIVFGGQPTAYLSMNDIHSILYEFFDKWEKKKEKLEKK |
| | | GEKELRKEIGKELEKKIVGKIQAQIQQIIDKDTNAKILKPYQDGNSTAI |
| | | DKEKLIKDLKQEQNILQKLKDEQTVREKEYNDFIAYQDKNREINKVR |
| | | DRNHKQYLKDNLKRKYPEAPARKEVLYYREKGKVAVWLANDIKRF |
| | | MPTDFKNEWKGEQHSLLQKSLAYYEQCKEELKNLLPEKVFQHLPFKL |
| | | GGYFQQKYLYQFYTCYLDKRLEYISGLVQQAENFKSENKVFKKVENE |
| | | CFKFLKKQNYTHKELDARVQSILGYPIFLERGFMDEKPTIIKGKTFKGN |
| | | EALFADWFRYYKEYQNFQTFYDTENYPLVELEKKQADRKRKTKIYQ |
| | | QKKNDVFTLLMAKHIFKSVFKQDSIDQFSLEDLYQSREERLGNQERAR |
| | | QTGERNTNYIWNKTVDLKLCDGKITVENVKLKNVGDFIKYEYDQRV |
| | | QAFLKYEENIEWQAFLIKESKEEENYPYVVEREIEQYEKVRREELLKE |
| | | VHLIEEYILEKVKDKEILKKGDNQNFKYYILNGLLKQLKNEDVESYKV |
| | | FNLNTEPEDVNINQLKQEATDLEQKAFVLTYIRNKFAHNQLPKKEFW |
| | | DYCQEKYGKIEKEKTYAEYFAEVFKKEKEALIK |
| Prevotella | 2 | MEDDKKTTDSIRYELKDKHFWAAFLNLARHNVYITVNHINKILEEGEI |
| intermedia | (SEQ | NRDGYETTLKNTWNEIKDINKKDRLSKLIIKHFPFLEAATYRLNPTDTT |
| | ID No. | KQKEEKQAEAQSLESLRKSFFVFIYKLRDLRNHYSHYKHSKSLERPKF |
| | 73) | EEGLLEKMYNIFNASIRLVKEDYQYNKDINPDEDFKHLDRTEEEFNYY |
| | | FTKDNEGNITESGLLFFVSLFLEKKDAIWMQQKLRGFKDNRENKKKM |
| | | TNEVFCRSRMLLPKLRLQSTQTQDWILLDMLNELIRCPKSLYERLREE |
| | | DREKFRVPIEIADEDYDAEQEPFKNTLVRHQDRFPYFALRYFDYNEIFT |
| | | NLRFQIDLGTYHFSIYKKQIGDYKESHHLTHKLYGFERIQEFTKQNRPD |
| | | EWRKFVKTFNSFETSKEPYIPETTPHYHLENQKIGIRFRNDNDKIWPSL |
| | | KTNSEKNEKSKYKLDKSFQAEAFLSVHELLPMMFYYLLLKTENTDND |
| | | NEIETKKKENKNDKQEKHKIEEIIENKITEIYALYDTFANGEIKSIDELE |
| | | EYCKGKDIEIGHLPKQMIAILKDEHKVMATEAERKQEEMLVDVQKSL |
| | | ESLDNQINEEIENVERKNSSLKSGKIASWLVNDMMRFQPVQKDNEGK |
| | | PLNNSKANSTEYQLLQRTLAFFGSEHERLAPYFKQTKLIESSNPHPFLK |
| | | DTEWEKCNNILSFYRSYLEAKKNFLESLKPEDWEKNQYFLKLKEPKT |
| | | KPKTLVQGWKNGFNLPRGIFTEPIRKWFMKHRENITVAELKRVGLVA |
| | | KVIPLFFSEEYKDSVQPFYNYHFNVGNINKPDEKNFLNCEERRELLRK |
| | | KKDEFKKMTDKEKEENPSYLEFKSWNKFERELRLVRNQDIVTWLLC |
| | | MELFNKKKIKELNVEKIYLKNINTNTTKKEKNTEEKNGEEKNIKEKNN |
| | | ILNRIMPMRLPIKVYGRENFSKNKKKKIRRNTFFTVYIEEKGTKLLKQG |
| | | NFKALERDRRLGGLFSFVKTPSKAESKSNTISKLRVEYELGEYQKARIE |
| | | IIKDMLALEKTLIDKYNSLDTDNFNKMLTDWLELKGEPDKASFQNDV |
| | | DLLIAVRNAFSHNQYPMRNRIAFANINPFSLSSANTSEEKGLGIANQLK |
| | | DKTHKTIEKIIEIEKPIETKE |
| Prevotella | 3 | MQKQDKLFVDRKKNAIFAFPKYITIMENKEKPEPIYYELTDKHFWAAF |
| buccae | (SEQ | LNLARHNVYTTINHINRRLEIAELKDDGYMMGIKGSWNEQAKKLDK |
| | ID No. | KVRLRDLIMKHFPFLEAAAYEMTNSKSPNNKEQREKEQSEALSLNNL |
| | 74) | KNVLFIFLEKLQVLRNYYSHYKYSEESPKPIFETSLLKNMYKVFDANV |
| | | RLVKRDYMEIHENIDMQRDFTHLNRKKQVGRTKNIIDSPNFHYHFAD |
| | | KEGNMTIAGLLFFVSLFLDKKDAIWMQKKLKGFKDGRNLREQMTNE |
| | | VFCRSRISLPKLKLENVQTKDWMQLDMLNELVRCPKSLYERLREKDR |
| | | ESFKVPFDIFSDDYNAEEEPFKNTLVRHQDRFPYFVLRYFDLNEIFEQL |
| | | RFQIDLGTYHFSIYNKRIGDEDEVRHLTHHLYGFARIQDFAPQNQPEE |
| | | WRKLVKDLDHFETSQEPYISKTAPHYHLENEKIGIKFCSAHNNLFPSL |
| | | QTDKTCNGRSKFNLGTQFTAEAFLSVHELLPMMFYYLLLTKDYSRKE |
| | | SADKVEGIIRKEISNIYAIYDAFANNEINSIADLTRRLQNTNILQGHLPK |
| | | QMISILKGRQKDMGKEAERKIGEMIDDTQRRLDLLCKQTNQKIRIGKR |
| | | NAGLLKSGKIADWLVNDMMRFQPVQKDQNNIPINNSKANSTEYRML |
| | | QRALALFGSENFRLKAYFNQMNLVGNDNPHPFLAETQWEHQTNILSF |
| | | YRNYLEARKKYLKGLKPQNWKQYQHFLILKVQKTNRNTLVTGWKN |
| | | SFNLPRGIFTQPIREWFEKHNNSKRIYDQILSFDRVGFVAKAIPLYFAEE |
| | | YKDNVQPFYDYPFNIGNRLKPKKRQFLDKKERVELWQKNKELFKNY |
| | | PSEKKKTDLAYLDFLSWKKFERELRLIKNQDIVTWLMFKELFNMATV |
| | | EGLKIGEIHLRDIDTNTANEESNNILNRIMPMKLPVKTYETDNKGNILK |
| | | ERPLATFYIEETETKVLKQGNFKALVKDRRLNGLFSFAETTDLNLEEH |
| | | PISKLSVDLELIKYQTTRISIFEMTLGLEKKLIDKYSTLPTDSFRNMLER |
| | | WLQCKANRPELKNYVNSLIAVRNAFSHNQYPMYDATLFAEVKKFTL |
| | | FPSVDTKKIELNIAPQLLEIVGKAIKEIEKSENKN |
| Porphy- | 4 | MNTVPASENKGQSRTVEDDPQYFGLYLNLARENLIEVESHVRIKFGK |
| romonas | (SEQ | KKLNEESLKQSLLCDHLLSVDRWTKVYGHSRRYLPFLHYFDPDSQIE |
| gingivalis | ID No. | KDHDSKTGVDPDSAQRLIRELYSLLDFLRNDFSHNRLDGTTFEHLEVS |
| | 75) | PDISSFITGTYSLACGRAQSRFAVFFKPDDFVLAKNRKEQLISVADGKE |
| | | CLTVSGFAFFICLFLDREQASGMLSRIRGFKRTDENWARAVHETFCDL |
| | | CIRHPHDRLESSNTKEALLLDMLNELNRCPRILYDMLPEEERAQFLPA |
| | | LDENSMNNLSENSLDEESRLLWDGSSDWAEALTKRIRHQDRFPYLML |
| | | RFIEEMDLLKGIRFRVDLGEIELDSYSKKVGRNGEYDRTITDHALAFG |
| | | KLSDFQNEEEVSRMISGEASYPVRFSLFAPRYAIYDNKIGYCHTSDPVY |
| | | PKSKTGEKRALSNPQSMGFISVHDLRKLLLMELLCEGSFSRMQSDFLR |
| | | KANRILDETAEGKLQFSALFPEMRHRFIPPQNPKSKDRREKAETTLEK |
| | | YKQEIKGRKDKLNSQLLSAFDMDQRQLPSRLLDEWMNIRPASHSVKL |
| | | RTYVKQLNEDCRLRLRKFRKDGDGKARAIPLVGEMATFLSQDIVRMII |
| | | SEETKKLITSAYYNEMQRSLAQYAGEENRRQFRAIVAELRLLDPSSGH |
| | | PFLSATMETAHRYTEGFYKCYLEKKREWLAKIFYRPEQDENTKRRISV |
| | | FFVPDGEARKLLPLLIRRRMKEQNDLQDWIRNKQAHPIDLPSHLFDSK |
| | | VMELLKVKDGKKKWNEAFKDWWSTKYPDGMQPFYGLRRELNIHGK |
| | | SVSYIPSDGKKFADCYTHLMEKTVRDKKRELRTAGKPVPPDLAADIK |
| | | RSFHRAVNEREFMLRLVQEDDRLMLMAINKMMTDREEDILPGLKNID |
| | | SILDEENQFSLAVHAKVLEKEGEGGDNSLSLVPATIEIKSKRKDWSKYI |
| | | RYRYDRRVPGLMSHFPEHKATLDEVKTLLGEYDRCRIKIFDWAFALE |
| | | GAIMSDRDLKPYLHESSSREGKSGEHSTLVKMLVEKKGCLTPDESQY |
| | | LILIRNKAAHNQFPCAAEMPLIYRDVSAKVGSIEGSSAKDLPEGSSLVD |
| | | SLWKKYEMIIRKILPILDPENRFFGKLLNNMSQPINDL |
| Bacteroides | 5 | MESIKNSQKSTGKTLQKDPPYFGLYLNMALLNVRKVENHIRKWLGD |
| pyogenes | (SEQ | VALLPEKSGFHSLLTTDNLSSAKWTRFYYKSRKFLPFLEMFDSDKKSY |
| | ID No. | ENRRETAECLDTIDRQKISSLLKEVYGKLQDIRNAFSHYHIDDQSVKH |
| | 76) | TALIISSEMHRFIENAYSFALQKTRARFTGVFVETDFLQAEEKGDNKKF |
| | | FAIGGNEGIKLKDNALIFLICLFLDREEAFKFLSRATGFKSTKEKGFLA |
| | | VRETFCALCCRQPHERLLSVNPREALLMDMLNELNRCPDILFEMLDE |
| | | KDQKSFLPLLGEEEQAHILENSLNDELCEAIDDPFEMIASLSKRVRYKN |
| | | RFPYLMLRYIEEKNLLPFIRFRIDLGCLELASYPKKMGEENNYERSVTD |
| | | HAMAFGRLTDFHNEDAVLQQITKGITDEVRFSLYAPRYAIYNNKIGFV |
| | | RTSGSDKISFPTLKKKGGEGHCVAYTLQNTKSFGFISIYDLRKILLLSFL |
| | | DKDKAKNIVSGLLEQCEKHWKDLSENLFDAIRTELQKEFPVPLIRYTL |
| | | PRSKGGKLVSSKLADKQEKYESEFERRKEKLTEILSEKDFDLSQIPRRM |
| | | IDEWLNVLPTSREKKLKGYVETLKLDCRERLRVFEKREKGEHPLPPRI |
| | | GEMATDLAKDIIRMVIDQGVKQRITSAYYSEIQRCLAQYAGDDNRRH |
| | | LDSIIRELRLKDTKNGHPFLGKVLRPGLGHTEKLYQRYFEEKKEWLEA |
| | | TFYPAASPKRVPRFVNPPTGKQKELPLIIRNLMKERPEWRDWKQRKN |
| | | SHPIDLPSQLFENEICRLLKDKIGKEPSGKLKWNEMFKLYWDKEFPNG |
| | | MQRFYRCKRRVEVFDKVVEYEYSEEGGNYKKYYEALIDEVVRQKISS |
| | | SKEKSKLQVEDLTLSVRRVFKRAINEKEYQLRLLCEDDRLLFMAVRD |
| | | LYDWKEAQLDLDKIDNMLGEPVSVSQVIQLEGGQPDAVIKAECKLKD |
| | | VSKLMRYCYDGRVKGLMPYFANHEATQEQVEMELRHYEDHRRRVF |
| | | NWVFALEKSVLKNEKLRRFYEESQGGCEHRRCIDALRKASLVSEEEY |
| | | EFLVHIRNKSAHNQFPDLEIGKLPPNVTSGFCECIWSKYKAIICRIIPFID |
| | | PERRFFGKLLEQK |
| Alistipes sp. | 6 | MSNEIGAFREHQFAYAPGNEKQEEATFATYFNLALSNVEGMMFGEVE |
| ZOR0009 | (SEQ | SNPDKIEKSLDTLPPAILRQIASFIWLSKEDHPDKAYSTEEVKVIVTDLV |
| | ID No. | RRLCFYRNYFSHCFYLDTQYFYSDELVDTTAIGEKLPYNFHHFITNRLF |
| | 77) | RYSLPEITLFRWNEGERKYEILRDGLIFFCCLFLKRGQAERFLNELRFF |
| | | KRTDEEGRIKRTIFTKYCTRESHKHIGIEEQDFLIFQDIIGDLNRVPKVC |
| | | DGVVDLSKENERYIKNRETSNESDENKARYRLLIREKDKFPYYLMRYI |
| | | VDFGVLPCITFKQNDYSTKEGRGQFHYQDAAVAQEERCYNFVVRNG |
| | | NVYYSYMPQAQNVVRISELQGTISVEELRNMVYASINGKDVNKSVEQ |
| | | YLYHLHLLYEKILTISGQTIKEGRVDVEDYRPLLDKLLLRPASNGEELR |
| | | RELRKLLPKRVCDLLSNRFDCSEGVSAVEKRLKAILLRHEQLLLSQNP |
| | | ALHIDKIKSVIDYLYLFFSDDEKFRQQPTEKAHRGLKDEEFQMYHYLV |
| | | GDYDSHPLALWKELEASGRLKPEMRKLTSATSLHGLYMLCLKGTVE |
| | | WCRKQLMSIGKGTAKVEAIADRVGLKLYDKLKEYTPEQLEREVKLV |
| | | VMHGYAAAATPKPKAQAAIPSKLTELRFYSFLGKREMSFAAFIRQDK |
| | | KAQKLWLRNFYTVENIKTLQKRQAAADAACKKLYNLVGEVERVHT |
| | | NDKVLVLVAQRYRERLLNVGSKCAVTLDNPERQQKLADVYEVQNA |
| | | WLSIRFDDLDFTLTHVNLSNLRKAYNLIPRKHILAFKEYLDNRVKQKL |
| | | CEECRNVRRKEDLCTCCSPRYSNLTSWLKENHSESSIEREAATMMLL |
| | | DVERKLLSFLLDERRKAIIEYGKFIPFSALVKECRLADAGLCGIRNDVL |
| | | HDNVISYADAIGKLSAYFPKEASEAVEYIRRTKEVREQRREELMANSS |
| | | Q |
| Prevotella | 7a | MSKECKKQRQEKKRRLQKANFSISLTGKHVFGAYFNMARTNFVKTIN |
| sp. MA2016 | (SEQ | YILPIAGVRGNYSENQINKMLHALFLIQAGRNEELTTEQKQWEKKLRL |
| | ID No. | NPEQQTKFQKLLFKHFPVLGPMMADVADHKAYLNKKKSTVQTEDET |
| | 78) | FAMLKGVSLADCLDIICLMADTLTECRNFYTHKDPYNKPSQLADQYL |
| | | HQEMIAKKLDKVVVASRRILKDREGLSVNEVEFLTGIDHLHQEVLKD |
| | | EFGNAKVKDGKVMKTFVEYDDFYFKISGKRLVNGYTVTTKDDKPVN |
| | | VNTMLPALSDFGLLYFCVLFLSKPYAKLFIDEVRLFEYSPFDDKENMI |
| | | MSEMLSIYRIRTPRLHKIDSHDSKATLAMDIFGELRRCPMELYNLLDK |
| | | NAGQPFFHDEVKHPNSHTPDVSKRLRYDDRFPTLALRYIDETELFKRI |
| | | RFQLQLGSFRYKFYDKENCIDGRVRVRRIQKEINGYGRMQEVADKRM |
| | | DKWGDLIQKREERSVKLEHEELYINLDQFLEDTADSTPYVTDRRPAY |
| | | NIHANRIGLYWEDSQNPKQYKVFDENGMYIPELVVTEDKKAPIKMPA |
| | | PRCALSVYDLPAMLFYEYLREQQDNEFPSAEQVIIEYEDDYRKFFKAV |
| | | AEGKLKPFKRPKEFRDFLKKEYPKLRMADIPKKLQLFLCSHGLCYNN |
| | | KPETVYERLDRLTLQHLEERELHIQNRLEHYQKDRDMIGNKDNQYGK |
| | | KSFSDVRHGALARYLAQSMMEWQPTKLKDKEKGHDKLTGLNYNVL |
| | | TAYLATYGHPQVPEEGFTPRTLEQVLINAHLIGGSNPHPFINKVLALGN |
| | | RNIEELYLHYLEEELKHIRSRIQSLSSNPSDKALSALPFIHHDRMRYHE |
| | | RTSEEMMALAARYTTIQLPDGLFTPYILEILQKHYTENSDLQNALSQD |
| | | VPVKLNPTCNAAYLITLFYQTVLKDNAQPFYLSDKTYTRNKDGEKAE |
| | | SFSFKRAYELFSVLNNNKKDTFPFEMIPLFLTSDEIQERLSAKLLDGDG |
| | | NPVPEVGEKGKPATDSQGNTIWKRRIYSEVDDYAEKLTDRDMKISFK |
| | | GEWEKLPRWKQDKIIKRRDETRRQMRDELLQRMPRYIRDIKDNERTL |
| | | RRYKTQDMVLFLLAEKMFTNIISEQSSEFNWKQMRLSKVCNEAFLRQ |
| | | TLTFRVPVTVGETTIYVEQENMSLKNYGEFYRFLTDDRLMSLLNNIVE |
| | | TLKPNENGDLVIRHTDLMSELAAYDQYRSTIFMLIQSIENLIITNNAVL |
| | | DDPDADGFWVREDLPKRNNFASLLELINQLNNVELTDDERKLLVAIR |
| | | NAFSHNSYNIDFSLIKDVKHLPEVAKGILQHLQSMLGVEITK |
| Prevotella | 7b | MSKECKKQRQEKKRRLQKANFSISLTGKHVFGAYFNMARTNFVKTIN |
| sp. MA2016 | (SEQ | YILPIAGVRGNYSENQINKMLHALFLIQAGRNEELTTEQKQWEKKLRL |
| | ID No. | NPEQQTKFQKLLFKHFPVLGPMMADVADHKAYLNKKKSTVQTEDET |
| | 79) | FAMLKGVSLADCLDIICLMADTLTECRNFYTHKDPYNKPSQLADQYL |
| | | HQEMIAKKLDKVVVASRRILKDREGLSVNEVEFLTGIDHLHQEVLKD |
| | | EFGNAKVKDGKVMKTFVEYDDFYFKISGKRLVNGYTVTTKDDKPVN |
| | | VNTMLPALSDFGLLYFCVLFLSKPYAKLFIDEVRLFEYSPFDDKENMI |
| | | MSEMLSIYRIRTPRLHKIDSHDSKATLAMDIFGELRRCPMELYNLLDK |
| | | NAGQPFFHDEVKHPNSHTPDVSKRLRYDDRFPTLALRYIDETELFKRI |
| | | RFQLQLGSFRYKFYDKENCIDGRVRVRRIQKEINGYGRMQEVADKRM |
| | | DKWGDLIQKREERSVKLEHEELYINLDQFLEDTADSTPYVTDRRPAY |
| | | NIHANRIGLYWEDSQNPKQYKVFDENGMYIPELVVTEDKKAPIKMPA |
| | | PRCALSVYDLPAMLFYEYLREQQDNEFPSAEQVIIEYEDDYRKFFKAV |
| | | AEGKLKPFKRPKEFRDFLKKEYPKLRMADIPKKLQLFLCSHGLCYNN |
| | | KPETVYERLDRLTLQHLEERELHIQNRLEHYQKDRDMIGNKDNQYGK |
| | | KSFSDVRHGALARYLAQSMMEWQPTKLKDKEKGHDKLTGLNYNVL |
| | | TAYLATYGHPQVPEEGFTPRTLEQVLINAHLIGGSNPHPFINKVLALGN |
| | | RNIEELYLHYLEEELKHIRSRIQSLSSNPSDKALSALPFIHHDRMRYHE |
| | | RTSEEMMALAARYTTIQLPDGLFTPYILEILQKHYTENSDLQNALSQD |
| | | VPVKLNPTCNAAYLITLFYQTVLKDNAQPFYLSDKTYTRNKDGEKAE |
| | | SFSFKRAYELFSVLNNNKKDTFPFEMIPLFLTSDEIQERLSAKLLDGDG |
| | | NPVPEVGEKGKPATDSQGNTIWKRRIYSEVDDYAEKLTDRDMKISFK |
| | | GEWEKLPRWKQDKIIKRRDETRRQMRDELLQRMPRYIRDIKDNERTL |
| | | RRYKTQDMVLFLLAEKMFTNIISEQSSEFNWKQMRLSKVCNEAFLRQ |
| | | TLTFRVPVTVGETTIYVEQENMSLKNYGEFYRFLTDDRLMSLLNNIVE |
| | | TLKPNENGDLVIRHTDLMSELAAYDQYRSTIFMLIQSIENLIITNNAVL |
| | | DDPDADGFWVREDLPKRNNFASLLELINQLNNVELTDDERKLLVAIR |
| | | NAFSHNSYNIDFSLIKDVKHLPEVAKGILQHLQSMLGVEITK |
| Riemerella | 8 | MEKPLLPNVYTLKHKFFWGAFLNIARHNAFITICHINEQLGLKTPSND |
| anatipestifer | (SEQ | DKIVDVVCETWNNILNNDHDLLKKSQLTELILKHFPFLTAMCYHPPK |
| | ID No. | KEGKKKGHQKEQQKEKESEAQSQAEALNPSKLIEALEILVNQLHSLR |
| | 80) | NYYSHYKHKKPDAEKDIFKHLYKAFDASLRMVKEDYKAHFTVNLTR |
| | | DFAHLNRKGKNKQDNPDFNRYRFEKDGFFTESGLLFFTNLFLDKRDA |
| | | YWMLKKVSGFKASHKQREKMTTEVFCRSRILLPKLRLESRYDHNQM |
| | | LLDMLSELSRCPKLLYEKLSEENKKHFQVEADGFLDEIEEEQNPFKDT |
| | | LIRHQDRFPYFALRYLDLNESFKSIRFQVDLGTYHYCIYDKKIGDEQEK |
| | | RHLTRTLLSFGRLQDFTEINRPQEWKALTKDLDYKETSNQPFISKTTPH |
| | | YHITDNKIGFRLGTSKELYPSLEIKDGANRIAKYPYNSGFVAHAFISVH |
| | | ELLPLMFYQHLTGKSEDLLKETVRHIQRIYKDFEEERINTIEDLEKANQ |
| | | GRLPLGAFPKQMLGLLQNKQPDLSEKAKIKIEKLIAETKLLSHRLNTK |
| | | LKSSPKLGKRREKLIKTGVLADWLVKDFMRFQPVAYDAQNQPIKSSK |
| | | ANSTEFWFIRRALALYGGEKNRLEGYFKQTNLIGNTNPHPFLNKFNW |
| | | KACRNLVDFYQQYLEQREKFLEAIKNQPWEPYQYCLLLKIPKENRKN |
| | | LVKGWEQGGISLPRGLFTEAIRETLSEDLMLSKPIRKEIKKHGRVGFIS |
| | | RAITLYFKEKYQDKHQSFYNLSYKLEAKAPLLKREEHYEYWQQNKP |
| | | QSPTESQRLELHTSDRWKDYLLYKRWQHLEKKLRLYRNQDVMLWL |
| | | MTLELTKNHFKELNLNYHQLKLENLAVNVQEADAKLNPLNQTLPMV |
| | | LPVKVYPATAFGEVQYHKTPIRTVYIREEHTKALKMGNFKALVKDRR |
| | | LNGLFSFIKEENDTQKHPISQLRLRRELEIYQSLRVDAFKETLSLEEKLL |
| | | NKHTSLSSLENEFRALLEEWKKEYAASSMVTDEHIAFIASVRNAFCHN |
| | | QYPFYKEALHAPIPLFTVAQPTTEEKDGLGIAEALLKVLREYCEIVKSQ |
| | | I |
| Prevotella | 9 | MEDDKKTTGSISYELKDKHFWAAFLNLARHNVYITINHINKLLEIREID |
| aurantiaca | (SEQ | NDEKVLDIKTLWQKGNKDLNQKARLRELMTKHFPFLETAIYTKNKED |
| | ID No. | KKEVKQEKQAEAQSLESLKDCLFLFLDKLQEARNYYSHYKYSEFSKE |
| | 81) | PEFEEGLLEKMYNIFGNNIQLVINDYQHNKDINPDEDFKHLDRKGQFK |
| | | YSFADNEGNITESGLLFFVSLFLEKKDAIWMQQKLNGFKDNLENKKK |
| | | MTHEVFCRSRILMPKLRLESTQTQDWILLDMLNELIRCPKSLYERLQG |
| | | DDREKFKVPFDPADEDYNAEQEPFKNTLIRHQDRFPYFVLRYFDYNEI |
| | | FKNLRFQIDLGTYHFSIYKKLIGGQKEDRHLTHKLYGFERIQEFAKQN |
| | | RPDEWKAIVKDLDTYETSNKRYISETTPHYHLENQKIGIRFRNGNKEI |
| | | WPSLKTNDENNEKSKYKLDKQYQAEAFLSVHELLPMMFYYLLLKKE |
| | | KPNNDEINASIVEGFIKREIRNIFKLYDAFANGEINNIDDLEKYCADKGI |
| | | PKRHLPKQMVAILYDEHKDMVKEAKRKQKEMVKDTKKLLATLEKQ |
| | | TQKEKEDDGRNVKLLKSGEIARWLVNDMMRFQPVQKDNEGKPLNNS |
| | | KANSTEYQMLQRSLALYNNEEKPTRYFRQVNLIESNNPHPFLKWTKW |
| | | EECNNILTFYYSYLTKKIEFLNKLKPEDWKKNQYFLKLKEPKTNRETL |
| | | VQGWKNGFNLPRGIFTEPIREWFKRHQNNSKEYEKVEALDRVGLVTK |
| | | VIPLFFKEEYFKDKEENFKEDTQKEINDCVQPFYNFPYNVGNIHKPKE |
| | | KDFLHREERIELWDKKKDKFKGYKEKIKSKKLTEKDKEEFRSYLEFQS |
| | | WNKFERELRLVRNQDIVTWLLCKELIDKLKIDELNIEELKKLRLNNID |
| | | TDTAKKEKNNILNRVMPMELPVTVYEIDDSHKIVKDKPLHTIYIKEAE |
| | | TKLLKQGNFKALVKDRRLNGLFSFVKTNSEAESKRNPISKLRVEYELG |
| | | EYQEARIEIIQDMLALEEKLINKYKDLPTNKFSEMLNSWLEGKDEADK |
| | | ARFQNDVDFLIAVRNAFSHNQYPMHNKIEFANIKPFSLYTANNSEEKG |
| | | LGIANQLKDKTKETTDKIKKIEKPIETKE |
| Prevotella | 10 | MEDKPFWAAFFNLARHNVYLTVNHINKLLDLEKLYDEGKHKEIFERE |
| saccharolytica | (SEQ | DIFNISDDVMNDANSNGKKRKLDIKKIWDDLDTDLTRKYQLRELILK |
| | ID No. | HFPFIQPAIIGAQTKERTTIDKDKRSTSTSNDSLKQTGEGDINDLLSLSN |
| | 82) | VKSMFFRLLQILEQLRNYYSHVKHSKSATMPNFDEDLLNWMRYIFIDS |
| | | VNKVKEDYSSNSVIDPNTSFSHLIYKDEQGKIKPCRYPFTSKDGSINAF |
| | | GLLFFVSLFLEKQDSIWMQKKIPGFKKASENYMKMTNEVFCRNHILLP |
| | | KIRLETVYDKDWMLLDMLNEVVRCPLSLYKRLTPAAQNKFKVPEKSS |
| | | DNANRQEDDNPFSRILVRHQNRFPYFVLRFFDLNEVFTTLRFQINLGC |
| | | YHFAICKKQIGDKKEVHHLIRTLYGFSRLQNFTQNTRPEEWNTLVKTT |
| | | EPSSGNDGKTVQGVPLPYISYTIPHYQIENEKIGIKIFDGDTAVDTDIWP |
| | | SVSTEKQLNKPDKYTLTPGFKADVFLSVHELLPMMFYYQLLLCEGML |
| | | KTDAGNAVEKVLIDTRNAIFNLYDAFVQEKINTITDLENYLQDKPILIG |
| | | HLPKQMIDLLKGHQRDMLKAVEQKKAMLIKDTERRLKLLDKQLKQE |
| | | TDVAAKNTGTLLKNGQIADWLVNDMMRFQPVKRDKEGNPINCSKAN |
| | | STEYQMLQRAFAFYATDSCRLSRYFTQLHLIHSDNSHLFLSRFEYDKQ |
| | | PNLIAFYAAYLKAKLEFLNELQPQNWASDNYFLLLRAPKNDRQKLAE |
| | | GWKNGFNLPRGLFTEKIKTWFNEHKTIVDISDCDIFKNRVGQVARLIP |
| | | VFFDKKFKDHSQPFYRYDFNVGNVSKPTEANYLSKGKREELFKSYQN |
| | | KFKNNIPAEKTKEYREYKNFSLWKKFERELRLIKNQDILIWLMCKNLF |
| | | DEKIKPKKDILEPRIAVSYIKLDSLQTNTSTAGSLNALAKVVPMTLAIHI |
| | | DSPKPKGKAGNNEKENKEFTVYIKEEGTKLLKWGNFKTLLADRRIKG |
| | | LFSYIEHDDIDLKQHPLTKRRVDLELDLYQTCRIDIFQQTLGLEAQLLD |
| | | KYSDLNTDNFYQMLIGWRKKEGIPRNIKEDTDFLKDVRNAFSHNQYP |
| | | DSKKIAFRRIRKFNPKELILEEEEGLGIATQMYKEVEKVVNRIKRIELFD |
| HMPREF9712_ | 11 | MKDILTTDTTEKQNRFYSHKIADKYFFGGYFNLASNNIYEVFEEVNKR |
| 03108 | (SEQ | NTFGKLAKRDNGNLKNYIIHVFKDELSISDFEKRVAIFASYFPILETVD |
| [Myroides | ID No. | KKSIKERNRTIDLTLSQRIRQFREMLISLVTAVDQLRNFYTHYFIHSDIVI |
| odoratimimus | 83) | ENKVLDFLNSSFVSTALHVKDKYLKTDKTKEFLKETIAAELDILIEAY |
| CCUG | | KKKQIEKKNTRFKANKREDILNAIYNEAFWSFINDKDKDKDKETVVA |
| 10230] | | KGADAYFEKNHHKSNDPDFALNISEKGIVYLLSFFLTNKEMDSLKAN |
| | | LTGFKGKVDRESGNSIKYMATQRIYSFHTYRGLKQKIRTSEEGVKETL |
| | | LMQMIDELSKVPNVVYQHLSTTQQNSFIEDWNEYYKDYEDDVETDD |
| | | LSRVIHPVIRKRYEDRFNYFAIRFLDEFFDFPTLRFQVHLGDYVHDRRT |
| | | KQLGKVESDRIIKEKVTVFARLKDINSAKASYFHSLEEQDKEELDNKW |
| | | TLFPNPSYDFPKEHTLQHQGEQKNAGKIGIYVKLRDTQYKEKAALEE |
| | | ARKSLNPKERSATKASKYDIITQIIEANDNVKSEKPLVFTGQPIAYLSM |
| | | NDIHSMLFSLLTDNAELKKTPEEVEAKLIDQIGKQINEILSKDTDTKILK |
| | | KYKDNDLKETDTDKITRDLARDKEEIEKLILEQKQRADDYNYTSSTKF |
| | | NIDKSRKRKHLLFNAEKGKIGVWLANDIKRFMFKESKSKWKGYQHT |
| | | ELQKLFAYFDTSKSDLELILSNMVMVKDYPIELIDLVKKSRTLVDFLN |
| | | KYLEARLEYIENVITRVKNSIGTPQFKTVRKECFTFLKKSNYTVVSLDK |
| | | QVERILSMPLFIERGFMDDKPTMLEGKSYKQHKEKFADWFVHYKENS |
| | | NYQNFYDTEVYEITTEDKREKAKVTKKIKQQQKNDVFTLMMVNYML |
| | | EEVLKLSSNDRLSLNELYQTKEERIVNKQVAKDTQERNKNYIWNKVV |
| | | DLQLCDGLVHIDNVKLKDIGNFRKYENDSRVKEFLTYQSDIVWSAYL |
| | | SNEVDSNKLYVIERQLDNYESIRSKELLKEVQEIECSVYNQVANKESL |
| | | KQSGNENFKQYVLQGLLPIGMDVREMLILSTDVKFKKEEIIQLGQAGE |
| | | VEQDLYSLIYIRNKFAHNQLPIKEFFDFCENNYRSISDNEYYAEYYMEI |
| | | FRSIKEKYAN |
| Prevotella | 12 | MEDDKKTTDSIRYELKDKHFWAAFLNLARHNVYITVNHINKILEEDEI |
| intermedia | (SEQ | NRDGYENTLENSWNEIKDINKKDRLSKLIIKHFPFLEATTYRQNPTDTT |
| | ID No. | KQKEEKQAEAQSLESLKKSFFVFIYKLRDLRNHYSHYKHSKSLERPKF |
| | 84) | EEDLQNKMYNIFDVSIQFVKEDYKHNTDINPKKDFKHLDRKRKGKFH |
| | | YSFADNEGNITESGLLFFVSLFLEKKDAIWVQKKLEGFKCSNKSYQK |
| | | MTNEVFCRSRMLLPKLRLESTQTQDWILLDMLNELIRCPKSLYERLQG |
| | | VNRKKFYVSFDPADEDYDAEQEPFKNTLVRHQDRFPYFALRYFDYNE |
| | | VFANLRFQIDLGTYHFSIYKKLIGGQKEDRHLTHKLYGFERIQEFDKQ |
| | | NRPDEWKAIVKDSDTFKKKEEKEEEKPYISETTPHYHLENKKIGIAFK |
| | | NHNIWPSTQTELTNNKRKKYNLGTSIKAEAFLSVHELLPMMFYYLLL |
| | | KTENTKNDNKVGGKKETKKQGKHKIEAIIESKIKDIYALYDAFANGEI |
| | | NSEDELKEYLKGKDIKIVHLPKQMIAILKNEHKDMAEKAEAKQEKMK |
| | | LATENRLKTLDKQLKGKIQNGKRYNSAPKSGEIASWLVNDMMRFQP |
| | | VQKDENGESLNNSKANSTEYQLLQRTLAFFGSEHERLAPYFKQTKLIE |
| | | SSNPHPFLNDTEWEKCSNILSFYRSYLKARKNFLESLKPEDWEKNQYF |
| | | LMLKEPKTNRETLVQGWKNGFNLPRGFFTEPIRKWFMEHWKSIKVD |
| | | DLKRVGLVAKVTPLFFSEKYKDSVQPFYNYPFNVGDVNKPKEEDFLH |
| | | REERIELWDKKKDKFKGYKAKKKFKEMTDKEKEEHRSYLEFQSWNK |
| | | FERELRLVRNQDIVTWLLCTELIDKLKIDELNIKELKKLRLKDINTDTA |
| | | KKEKNNILNRVMPMELPVTVYKVNKGGYIIKNKPLHTIYIKEAETKLL |
| | | KQGNFKALVKDRRLNGLFSFVKTPSEAESESNPISKLRVEYELGKYQN |
| | | ARLDIIEDMLALEKKLIDKYNSLDTDNFHNMLTGWLELKGEAKKARF |
| | | QNDVKLLTAVRNAFSHNQYPMYDENLFGNIERFSLSSSNIIESKGLDIA |
| | | AKLKEEVSKAAKKIQNEEDNKKEKET |
| Capnocyto- | 13 | MKNIQRLGKGNEFSPFKKEDKFYFGGFLNLANNNIEDFFKEIITRFGIVI |
| phaga | (SEQ | TDENKKPKETFGEKILNEIFKKDISIVDYEKWVNIFADYFPFTKYLSLY |
| canimorsus | ID No. | LEEMQFKNRVICFRDVMKELLKTVEALRNFYTHYDHEPIKIEDRVFYF |
| | 85) | LDKVLLDVSLTVKNKYLKTDKTKEFLNQHIGEELKELCKQRKDYLVG |
| | | KGKRIDKESEIINGIYNNAFKDFICKREKQDDKENHNSVEKILCNKEPQ |
| | | NKKQKSSATVWELCSKSSSKYTEKSFPNRENDKHCLEVPISQKGIVFL |
| | | LSFFLNKGEIYALTSNIKGFKAKITKEEPVTYDKNSIRYMATHRMFSFL |
| | | AYKGLKRKIRTSEINYNEDGQASSTYEKETLMLQMLDELNKVPDVVY |
| | | QNLSEDVQKTFIEDWNEYLKENNGDVGTMEEEQVIHPVIRKRYEDKF |
| | | NYFAIRFLDEFAQFPTLRFQVHLGNYLCDKRTKQICDTTTEREVKKKI |
| | | TVFGRLSELENKKAIFLNEREEIKGWEVFPNPSYDFPKENISVNYKDFP |
| | | IVGSILDREKQPVSNKIGIRVKIADELQREIDKAIKEKKLRNPKNRKAN |
| | | QDEKQKERLVNEIVSTNSNEQGEPVVFIGQPTAYLSMNDIHSVLYEFLI |
| | | NKISGEALETKIVEKIETQIKQIIGKDATTKILKPYTNANSNSINREKLLR |
| | | DLEQEQQILKTLLEEQQQREKDKKDKKSKRKHELYPSEKGKVAVWL |
| | | ANDIKRFMPKAFKEQWRGYHHSLLQKYLAYYEQSKEELKNLLPKEV |
| | | FKHFPFKLKGYFQQQYLNQFYTDYLKRRLSYVNELLLNIQNFKNDKD |
| | | ALKATEKECFKFFRKQNYIINPINIQIQSILVYPIFLKRGFLDEKPTMIDR |
| | | EKFKENKDTELADWFMHYKNYKEDNYQKFYAYPLEKVEEKEKFKR |
| | | NKQINKQKKNDVYTLMMVEYIIQKIFGDKFVEENPLVLKGIFQSKAER |
| | | QQNNTHAATTQERNLNGILNQPKDIKIQGKITVKGVKLKDIGNFRKYE |
| | | IDQRVNTFLDYEPRKEWMAYLPNDWKEKEKQGQLPPNNVIDRQISKY |
| | | ETVRSKILLKDVQELEKIISDEIKEEHRHDLKQGKYYNFKYYILNGLLR |
| | | QLKNENVENYKVFKLNTNPEKVNITQLKQEATDLEQKAFVLTYIRNK |
| | | FAHNQLPKKEFWDYCQEKYGKIEKEKTYAEYFAEVFKREKEALIK |
| Porphyromonas | 14 | MTEQSERPYNGTYYTLEDKHFWAAFLNLARHNAYITLTHIDRQLAYS |
| gulae | (SEQ | KADITNDQDVLSFKALWKNFDNDLERKSRLRSLILKHFSFLEGAAYG |
| | ID No. | KKLFESKSSGNKSSKNKELTKKEKEELQANALSLDNLKSILFDFLQKL |
| | 86) | KDFRNYYSHYRHSGSSELPLFDGNMLQRLYNVFDVSVQRVKIDHEHN |
| | | DEVDPHYHFNHLVRKGKKDRYGHNDNPSFKHHFVDGEGMVTEAGL |
| | | LFFVSLFLEKRDAIWMQKKIRGFKGGTETYQQMTNEVFCRSRISLPKL |
| | | KLESLRMDDWMLLDMLNELVRCPKPLYDRLREDDRACFRVPVDILP |
| | | DEDDTDGGGEDPFKNTLVRHQDRFPYFALRYFDLKKVFTSLRFHIDL |
| | | GTYHFAIYKKMIGEQPEDRHLTRNLYGFGRIQDFAEEHRPEEWKRLV |
| | | RDLDYFETGDKPYISQTSPHYHIEKGKIGLRFMPEGQHLWPSPEVGTT |
| | | RTGRSKYAQDKRLTAEAFLSVHELMPMMFYYFLLREKYSEEVSAERV |
| | | QGRIKRVIEDVYAVYDAFARDEINTRDELDACLADKGIRRGHLPRQMI |
| | | AILSQEHKDMEEKIRKKLQEMMADTDHRLDMLDRQTDRKIRIGRKN |
| | | AGLPKSGVIADWLVRDMMRFQPVAKDASGKPLNNSKANSTEYRMLQ |
| | | RALALFGGEKERLTPYFRQMNLTGGNNPHPFLHETRWESHTNILSFYR |
| | | SYLRARKAFLERIGRSDRVENRPFLLLKEPKTDRQTLVAGWKGEFHLP |
| | | RGIFTEAVRDCLIEMGHDEVASYKEVGFMAKAVPLYFERACEDRVQP |
| | | FYDSPFNVGNSLKPKKGRFLSKEERAEEWERGKERFRDLEAWSYSAA |
| | | RRIEDAFAGIEYASPGNKKKIEQLLRDLSLWEAFESKLKVRADRINLA |
| | | KLKKEILEAQEHPYHDFKSWQKFERELRLVKNQDIITWMMCRDLMEE |
| | | NKVEGLDTGTLYLKDIRPNVQEQGSLNVLNRVKPMRLPVVVYRADS |
| | | RGHVHKEEAPLATVYIEERDTKLLKQGNFKSFVKDRRLNGLFSFVDT |
| | | GGLAMEQYPISKLRVEYELAKYQTARVCVFELTLRLEESLLTRYPHLP |
| | | DESFREMLESWSDPLLAKWPELHGKVRLLIAVRNAFSHNQYPMYDE |
| | | AVFSSIRKYDPSSPDAIEERMGLNIAHRLSEEVKQAKETVERIIQA |
| Prevotella | 15 | MNIPALVENQKKYFGTYSVMAMLNAQTVLDHIQKVADIEGEQNENN |
| sp. P5-125 | (SEQ | ENLWFHPVMSHLYNAKNGYDKQPEKTMFIIERLQSYFPFLKIMAENQ |
| | ID No. | REYSNGKYKQNRVEVNSNDIFEVLKRAFGVLKMYRDLTNHYKTYEE |
| | 87) | KLNDGCEFLTSTEQPLSGMINNYYTVALRNMNERYGYKTEDLAFIQD |
| | | KRFKFVKDAYGKKKSQVNTGFFLSLQDYNGDTQKKLHLSGVGIALLI |
| | | CLFLDKQYINIFLSRLPIFSSYNAQSEERRIIIRSFGINSIKLPKDRIHSEKS |
| | | NKSVAMDMLNEVKRCPDELFTTLSAEKQSRFRIISDDHNEVLMKRSS |
| | | DRFVPLLLQYIDYGKLFDHIRFHVNMGKLRYLLKADKTCIDGQTRVR |
| | | VIEQPLNGFGRLEEAETMRKQENGTFGNSGIRIRDFENMKRDDANPA |
| | | NYPYIVDTYTHYILENNKVEMFINDKEDSAPLLPVIEDDRYVVKTIPSC |
| | | RMSTLEIPAMAFHMFLFGSKKTEKLIVDVHNRYKRLFQAMQKEEVTA |
| | | ENIASFGIAESDLPQKILDLISGNAHGKDVDAFIRLTVDDMLTDTERRI |
| | | KRFKDDRKSIRSADNKMGKRGFKQISTGKLADFLAKDIVLFQPSVND |
| | | GENKITGLNYRIMQSAIAVYDSGDDYEAKQQFKLMFEKARLIGKGTT |
| | | EPHPFLYKVFARSIPANAVEFYERYLIERKFYLTGLSNEIKKGNRVDVP |
| | | FIRRDQNKWKTPAMKTLGRIYSEDLPVELPRQMFDNEIKSHLKSLPQM |
| | | EGIDFNNANVTYLIAEYMKRVLDDDFQTFYQWNRNYRYMDMLKGE |
| | | YDRKGSLQHCFTSVEEREGLWKERASRTERYRKQASNKIRSNRQMRN |
| | | ASSEEIETILDKRLSNSRNEYQKSEKVIRRYRVQDALLFLLAKKTLTEL |
| | | ADFDGERFKLKEIMPDAEKGILSEIMPMSFTFEKGGKKYTITSEGMKL |
| | | KNYGDFFVLASDKRIGNLLELVGSDIVSKEDIMEEFNKYDQCRPEISSI |
| | | VFNLEKWAFDTYPELSARVDREEKVDFKSILKILLNNKNINKEQSDILR |
| | | KIRNAFDHNNYPDKGVVEIKALPEIAMSIKKAFGEYAIMK |
| Flavobacterium | 16 | MENLNKILDKENEICISKIFNTKGIAAPITEKALDNIKSKQKNDLNKEA |
| branchiophilum | (SEQ | RLHYFSIGHSFKQIDTKKVFDYVLIEELKDEKPLKFITLQKDFFTKEFSI |
| | ID No. | KLQKLINSIRNINNHYVHNFNDINLNKIDSNVFHFLKESFELAIIEKYYK |
| | 88) | VNKKYPLDNEIVLFLKELFIKDENTALLNYFTNLSKDEAIEYILTFTITE |
| | | NKIWNINNEHNILNIEKGKYLTFEAMLFLITIFLYKNEANHLLPKLYDF |
| | | KNNKSKQELFTFFSKKFTSQDIDAEEGHLIKFRDMIQYLNHYPTAWNN |
| | | DLKLESENKNKIMTTKLIDSIIEFELNSNYPSFATDIQFKKEAKAFLFAS |
| | | NKKRNQTSFSNKSYNEEIRHNPHIKQYRDEIASALTPISFNVKEDKFKIF |
| | | VKKHVLEEYFPNSIGYEKFLEYNDFTEKEKEDFGLKLYSNPKTNKLIE |
| | | RIDNHKLVKSHGRNQDRFMDFSMRFLAENNYFGKDAFFKCYKFYDT |
| | | QEQDEFLQSNENNDDVKFHKGKVTTYIKYEEHLKNYSYWDCPFVEE |
| | | NNSMSVKISIGSEEKILKIQRNLMIYFLENALYNENVENQGYKLVNNY |
| | | YRELKKDVEESIASLDLIKSNPDFKSKYKKILPKRLLHNYAPAKQDKA |
| | | PENAFETLLKKADFREEQYKKLLKKAEHEKNKEDFVKRNKGKQFKL |
| | | HFIRKACQMMYFKEKYNTLKEGNAAFEKKDPVIEKRKNKEHEFGHH |
| | | KNLNITREEFNDYCKWMFAFNGNDSYKKYLRDLFSEKHFFDNQEYK |
| | | NLFESSVNLEAFYAKTKELFKKWIETNKPTNNENRYTLENYKNLILQK |
| | | QVFINVYHFSKYLIDKNLLNSENNVIQYKSLENVEYLISDFYFQSKLSI |
| | | DQYKTCGKLFNKLKSNKLEDCLLYEIAYNYIDKKNVHKIDIQKILTSKI |
| | | ILTINDANTPYKISVPFNKLERYTEMIAIKNQNNLKARFLIDLPLYLSKN |
| | | KIKKGKDSAGYEIIIKNDLEIEDINTINNKIINDSVKFTEVLMELEKYFIL |
| | | KDKCILSKNYIDNSEIPSLKQFSKVWIKENENEIINYRNIACHFHLPLLE |
| | | TFDNLLLNVEQKFIKEELQNVSTINDLSKPQEYLILLFIKFKHNNFYLN |
| | | LFNKNESKTIKNDKEVKKNRVLQKFINQVILKKK |
| Myroides | 17 | MKDILTTDTTEKQNRFYSHKIADKYFFGGYFNLASNNIYEVFEEVNKR |
| odoratimimus | (SEQ | NTFGKLAKRDNGNLKNYIIHVFKDELSISDFEKRVAIFASYFPILETVD |
| | ID No. | KKSIKERNRTIDLTLSQRIRQFREMLISLVTAVDQLRNFYTHYFIHSDIVI |
| | 89) | ENKVLDFLNSSFVSTALHVKDKYLKTDKTKEFLKETIAAELDILIEAY |
| | | KKKQIEKKNTRFKANKREDILNAIYNEAFWSFINDKDKDKDKETVVA |
| | | KGADAYFEKNHHKSNDPDFALNISEKGIVYLLSFFLTNKEMDSLKAN |
| | | LTGFKGKVDRESGNSIKYMATQRIYSFHTYRGLKQKIRTSEEGVKETL |
| | | LMQMIDELSKVPNVVYQHLSTTQQNSFIEDWNEYYKDYEDDVETDD |
| | | LSRVTHPVIRKRYEDRFNYFAIRFLDEFFDFPTLRFQVHLGDYVHDRR |
| | | TKQLGKVESDRIIKEKVTVFARLKDINSAKASYFHSLEEQDKEELDNK |
| | | WTLFPNPSYDFPKEHTLQHQGEQKNAGKIGIYVKLRDTQYKEKAALE |
| | | EARKSLNPKERSATKASKYDIITQIIEANDNVKSEKPLVFTGQPIAYLS |
| | | MNDIHSMLFSLLTDNAELKKTPEEVEAKLIDQIGKQINEILSKDTDTKI |
| | | LKKYKDNDLKETDTDKITRDLARDKEEIEKLILEQKQRADDYNYTSST |
| | | KFNIDKSRKRKHLLFNAEKGKIGVWLANDIKRFMFKESKSKWKGYQ |
| | | HIELQKLFAYFDTSKSDLELILSNMVMVKDYPIELIDLVKKSRTLVDFL |
| | | NKYLEARLEYIENVITRVKNSIGTPQFKTVRKECFTFLKKSNYTVVSLD |
| | | KQVERILSMPLFIERGFMDDKPTMLEGKSYKQHKEKFADWFVHYKE |
| | | NSNYQNFYDTEVYEITTEDKREKAKVTKKIKQQQKNDVFTLMMVNY |
| | | MLEEVLKLSSNDRLSLNELYQTKEERIVNKQVAKDTQERNKNYIWNK |
| | | VVDLQLCDGLVHIDNVKLKDIGNFRKYENDSRVKEFLTYQSDIVWSA |
| | | YLSNEVDSNKLYVIERQLDNYESIRSKELLKEVQEIECSVYNQVANKE |
| | | SLKQSGNENFKQYVLQGLLPIGMDVREMLILSTDVKFKKEEIIQLGQA |
| | | GEVEQDLYSLIYIRNKFAHNQLPIKEFFDFCENNYRSISDNEYYAEYY |
| | | MEIFRSIKEKYAN |
| Flavobacterium | 18 | MSSKNESYNKQKTFNHYKQEDKYFFGGFLNNADDNLRQVGKEFKTR |
| columnare | (SEQ | INFNHNNNELASVFKDYFNKEKSVAKREHALNLLSNYFPVLERIQKHT |
| | ID No. | NHNFEQTREIFELLLDTIKKLRDYYTHEIYHKPITINPKIYDFLDDTLLD |
| | 90) | VLITIKKKKVKNDTSRELLKEKLRPELTQLKNQKREELIKKGKKLLEE |
| | | NLENAVFNHCLIPFLEENKTDDKQNKTVSLRKYRKSKPNEETSITLTQ |
| | | SGLVFLMSFFLHRKEFQVFTSGLERFKAKVNTIKEEEISLNKNNIVYMI |
| | | THWSYSYYNFKGLKHRIKTDQGVSTLEQNNTTHSLTNTNTKEALLTQ |
| | | IVDYLSKVPNEIYETLSEKQQKEFEEDINEYMRENPENEDSTFSSIVSH |
| | | KVIRKRYENKFNYFAMRFLDEYAELPTLRFMVNFGDYIKDRQKKILES |
| | | IQFDSERIIKKEIHLFEKLSLVTEYKKNVYLKETSNIDLSRFPLFPNPSYV |
| | | MANNNIPFYIDSRSNNLDEYLNQKKKAQSQNKKRNLTFEKYNKEQSK |
| | | DAIIAMLQKEIGVKDLQQRSTIGLLSCNELPSMLYEVIVKDIKGAELEN |
| | | KIAQKIREQYQSIRDFTLDSPQKDNIPTTLIKTINTDSSVTFENQPIDIPRL |
| | | KNALQKELTLTQEKLLNVKEHEIEVDNYNRNKNTYKFKNQPKNKVD |
| | | DKKLQRKYVFYRNEIRQEANWLASDLIHFMKNKSLWKGYMHNELQS |
| | | FLAFFEDKKNDCIALLETVFNLKEDCILTKGLKNLFLKHGNFIDFYKEY |
| | | LKLKEDFLSTESTFLENGFIGLPPKILKKELSKRLKYIFIVFQKRQFIIKE |
| | | LEEKKNNLYADAINLSRGIFDEKPTMIPFKKPNPDEFASWFVASYQYN |
| | | NYQSFYELTPDIVERDKKKKYKNLRAINKVKIQDYYLKLMVDTLYQD |
| | | LFNQPLDKSLSDFYVSKAEREKIKADAKAYQKLNDSSLWNKVIHLSL |
| | | QNNRITANPKLKDIGKYKRALQDEKIATLLTYDARTWTYALQKPEKE |
| | | NENDYKELHYTALNMELQEYEKVRSKELLKQVQELEKKILDKFYDFS |
| | | NNASHPEDLEIEDKKGKRHPNFKLYITKALLKNESEIINLENIDIEILLK |
| | | YYDYNTEELKEKIKNMDEDEKAKIINTKENYNKITNVLIKKALVLIIIR |
| | | NKMAHNQYPPKFIYDLANRFVPKKEEEYFATYFNRVFETITKELWEN |
| | | KEKKDKTQV |
| Porphyromonas | 19 | MTEQNEKPYNGTYYTLEDKHFWAAFLNLARHNAYITLAHIDRQLAY |
| gingivalis | (SEQ | SKADITNDEDILFFKGQWKNLDNDLERKARLRSLILKHFSFLEGAAYG |
| | ID No. | KKLFESQSSGNKSSKKKELSKKEKEELQANALSLDNLKSILFDFLQKL |
| | 91) | KDFRNYYSHYRHPESSELPLFDGNMLQRLYNVFDVSVQRVKRDHEH |
| | | NDKVDPHRHFNHLVRKGKKDKYGNNDNPFFKHHFVDREGTVTEAGL |
| | | LFFVSLFLEKRDAIWMQKKIRGFKGGTEAYQQMTNEVFCRSRISLPKL |
| | | KLESLRTDDWMLLDMLNELVRCPKSLYDRLREEDRARFRVPVDILSD |
| | | EDDTDGTEEDPFKNTLVRHQDRFPYFALRYFDLKKVFTSLRFHIDLGT |
| | | YHFAIYKKNIGEQPEDRHLTRNLYGFGRIQDFAEEHRPEEWKRLVRDL |
| | | DYFETGDKPYITQTTPHYHIEKGKIGLRFVPEGQHLWPSPEVGATRTG |
| | | RSKYAQDKRLTAEAFLSVHELMPMMFYYFLLREKYSEEVSAEKVQG |
| | | RIKRVIEDVYAVYDAFARDEINTRDELDACLADKGIRRGHLPRQMIAI |
| | | LSQEHKDMEEKVRKKLQEMIADTDHRLDMLDRQTDRKIRIGRKNAG |
| | | LPKSGVVADWLVRDMMRFQPVAKDTSGKPLNNSKANSTEYRMLQR |
| | | ALALFGGEKERLTPYFRQMNLTGGNNPHPFLHETRWESHTNILSFYRS |
| | | YLEARKAFLQSIGRSDRVENHRFLLLKEPKTDRQTLVAGWKGEFHLP |
| | | RGIFTEAVRDCLIEMGYDEVGSYKEVGFMAKAVPLYFERASKDRVQP |
| | | FYDYPFNVGNSLKPKKGRFLSKEKRAEEWESGKERFRLAKLKKEILE |
| | | AKEHPYHDFKSWQKFERELRLVKNQDIITWMMCRDLMEENKVEGLD |
| | | TGTLYLKDIRTDVQEQGSLNVLNRVKPMRLPVVVYRADSRGHVHKE |
| | | QAPLATVYIEERDTKLLKQGNFKSFVKDRRLNGLFSFVDTGALAMEQ |
| | | YPISKLRVEYELAKYQTARVCAFEQTLELEESLLTRYPHLPDKNFRKM |
| | | LESWSDPLLDKWPDLHGNVRLLIAVRNAFSHNQYPMYDETLFSSIRK |
| | | YDPSSPDAIEERMGLNIAHRLSEEVKQAKEMVERIIQA |
| Porphyromonas | 20 | MTEQSERPYNGTYYTLEDKHFWAAFLNLARHNAYITLTHIDRQLAYS |
| sp. | (SEQ | KADITNDQDVLSFKALWKNFDNDLERKSRLRSLILKHFSFLEGAAYG |
| CoT-052 | ID No. | KKLFESKSSGNKSSKNKELTKKEKEELQANALSLDNLKSILFDFLQKL |
| OH4946 | 92) | KDFRNYYSHYRHSESSELPLFDGNMLQRLYNVFDVSVQRVKRDHEH |
| | | NDKVDPHRHFNHLVRKGKKDRYGHNDNPSFKHHFVDSEGMVTEAG |
| | | LLFFVSLFLEKRDAIWMQKKIRGFKGGTETYQQMTNEVFCRSRISLPK |
| | | LKLESLRTDDWMLLDMLNELVRCPKPLYDRLREDDRACFRVPVDILP |
| | | DEDDTDGGGEDPFKNTLVRHQDRFPYFALRYFDLKKVFTSLRFHIDL |
| | | GTYHFAIYKKMIGEQPEDRHLTRNLYGFGRIQDFAEEHRPEEWKRLV |
| | | RDLDYFETGDKPYISQTTPHYHIEKGKIGLRFVPEGQHLWPSPEVGTT |
| | | RTGRSKYAQDKRLTAEAFLSVHELMPMMFYYFLLREKYSEEVSAEK |
| | | VQGRIKRVIEDVYAIYDAFARDEINTLKELDACLADKGIRRGHLPKQM |
| | | IGILSQERKDMEEKVRKKLQEMIADTDHRLDMLDRQTDRKIRIGRKN |
| | | AGLPKSGVIADWLVRDMMRFQPVAKDTSGKPLNNSKANSTEYRMLQ |
| | | RALALFGGEKERLTPYFRQMNLTGGNNPHPFLHETRWESHTNILSFYR |
| | | SYLRARKAFLERIGRSDRVENCPFLLLKEPKTDRQTLVAGWKGEFHLP |
| | | RGIFTEAVRDCLIEMGYDEVGSYREVGFMAKAVPLYFERACEDRVQP |
| | | FYDSPFNVGNSLKPKKGRFLSKEDRAEEWERGKERFRDLEAWSHSAA |
| | | RRIKDAFAGIEYASPGNKKKIEQLLRDLSLWEAFESKLKVRADKINLA |
| | | KLKKEILEAQEHPYHDFKSWQKFERELRLVKNQDIITWMMCRDLMEE |
| | | NKVEGLDTGTLYLKDIRPNVQEQGSLNVLNRVKPMRLPVVVYRADS |
| | | RGHVHKEEAPLATVYIEERDTKLLKQGNFKSFVKDRRLNGLFSFVDT |
| | | GGLAMEQYPISKLRVEYELAKYQTARVCVFELTLRLEESLLSRYPHLP |
| | | DESFREMLESWSDPLLAKWPELHGKVRLLIAVRNAFSHNQYPMYDE |
| | | AVFSSIRKYDPSSPDAIEERMGLNIAHRLSEEVKQAKETVERIIQA |
| Prevotella | 21 | MEDDKKTKESTNMLDNKHFWAAFLNLARHNVYITVNHINKVLELKN |
| intermedia | (SEQ | KKDQDIIIDNDQDILAIKTHWEKVNGDLNKTERLRELMTKHFPFLETAI |
| | ID No. | YTKNKEDKEEVKQEKQAKAQSFDSLKHCLFLFLEKLQEARNYYSHY |
| | 93) | KYSESTKEPMLEKELLKKMYNIFDDNIQLVIKDYQHNKDINPDEDFKH |
| | | LDRTEEEFNYYFTTNKKGNITASGLLFFVSLFLEKKDAIWMQQKLRGF |
| | | KDNRESKKKMTHEVFCRSRMLLPKLRLESTQTQDWILLDMLNELIRC |
| | | PKSLYERLQGEYRKKFNVPFDSADEDYDAEQEPFKNTLVRHQDRFPY |
| | | FALRYFDYNEIFTNLRFQIDLGTYHFSIYKKLIGGQKEDRHLTHKLYGF |
| | | ERIQEFAKQNRTDEWKAIVKDFDTYETSEEPYISETAPHYHLENQKIGI |
| | | RFRNDNDEIWPSLKTNGENNEKRKYKLDKQYQAEAFLSVHELLPMM |
| | | FYYLLLKKEEPNNDKKNASIVEGFIKREIRDIYKLYDAFANGEINNIDD |
| | | LEKYCEDKGIPKRHLPKQMVAILYDEHKDMAEEAKRKQKEMVKDTK |
| | | KLLATLEKQTQGEIEDGGRNIRLLKSGEIARWLVNDMMRFQPVQKDN |
| | | EGNPLNNSKANSTEYQMLQRSLALYNKEEKPTRYFRQVNLINSSNPHP |
| | | FLKWTKWEECNNILSFYRSYLTKKIEFLNKLKPEDWEKNQYFLKLKE |
| | | PKTNRETLVQGWKNGFNLPRGIFTEPIREWFKRHQNDSEEYEKVETLD |
| | | RVGLVTKVIPLFFKKEDSKDKEEYLKKDAQKEINNCVQPFYGFPYNV |
| | | GNIHKPDEKDFLPSEERKKLWGDKKYKFKGYKAKVKSKKLTDKEKE |
| | | EYRSYLEFQSWNKFERELRLVRNQDIVTWLLCTELIDKLKVEGLNVEE |
| | | LKKLRLKDIDTDTAKQEKNNILNRVMPMQLPVTVYEIDDSHNIVKDR |
| | | PLHTVYIEETKTKLLKQGNFKALVKDRRLNGLFSFVDTSSETELKSNPI |
| | | SKSLVEYELGEYQNARIETIKDMLLLEETLIEKYKTLPTDNFSDMLNG |
| | | WLEGKDEADKARFQNDVKLLVAVRNAFSHNQYPMRNRIAFANINPF |
| | | SLSSADTSEEKKLDIANQLKDKTHKIIKRIIEIEKPIETKE |
| PIN17_0200 | AFJ07523 | MKMEDDKKTKESTNMLDNKHFWAAFLNLARHNVYITVNHINKVLEL |
| [Prevotella | (SEQ | KNKKDQDIIIDNDQDILAIKTHWEKVNGDLNKTERLRELMTKHFPFLE |
| intermedia | ID No. | TAIYTKNKEDKEEVKQEKQAKAQSFDSLKHCLFLFLEKLQEARNYYS |
| 17] | 94) | HYKYSESTKEPMLEKELLKKMYNIFDDNIQLVIKDYQHNKDINPDEDF |
| | | KHLDRTEEEFNYYFTTNKKGNITASGLLFFVSLFLEKKDAIWMQQKL |
| | | RGFKDNRESKKKMTHEVFCRSRMLLPKLRLESTQTQDWILLDMLNEL |
| | | IRCPKSLYERLQGEYRKKFNVPFDSADEDYDAEQEPFKNTLVRHQDR |
| | | FPYFALRYFDYNEIFTNLRFQIDLGTYHFSIYKKLIGGQKEDRHLTHKL |
| | | YGFERIQEFAKQNRTDEWKAIVKDFDTYETSEEPYISETAPHYHLENQ |
| | | KIGIRFRNDNDEIWPSLKTNGENNEKRKYKLDKQYQAEAFLSVHELLP |
| | | MMFYYLLLKKEEPNNDKKNASIVEGFIKREIRDIYKLYDAFANGEINN |
| | | IDDLEKYCEDKGIPKRHLPKQMVAILYDEHKDMAEEAKRKQKEMVK |
| | | DTKKLLATLEKQTQGEIEDGGRNIRLLKSGEIARWLVNDMMRFQPVQ |
| | | KDNEGNPLNNSKANSTEYQMLQRSLALYNKEEKPTRYFRQVNLINSS |
| | | NPHPFLKWTKWEECNNILSFYRSYLTKKIEFLNKLKPEDWEKNQYFL |
| | | KLKEPKTNRETLVQGWKNGFNLPRGIFTEPIREWFKRHQNDSEEYEK |
| | | VETLDRVGLVTKVIPLFFKKEDSKDKEEYLKKDAQKEINNCVQPFYGF |
| | | PYNVGNIHKPDEKDFLPSEERKKLWGDKKYKFKGYKAKVKSKKLTD |
| | | KEKEEYRSYLEFQSWNKFERELRLVRNQDIVTWLLCTELIDKLKVEGL |
| | | NVEELKKLRLKDIDTDTAKQEKNNILNRVMPMQLPVTVYEIDDSHNI |
| | | VKDRPLHTVYIEETKTKLLKQGNFKALVKDRRLNGLFSFVDTSSETEL |
| | | KSNPISKSLVEYELGEYQNARIETIKDMLLLEETLIEKYKTLPTDNFSD |
| | | MLNGWLEGKDEADKARFQNDVKLLVAVRNAFSHNQYPMRNRIAFA |
| | | NINPFSLSSADTSEEKKLDIANQLKDKTHKIIKRIIEIEKPIETKE |
| Prevotella | BAU18623 | MEDDKKTTDSISYELKDKHFWAAFLNLARHNVYITVNHINKVLELKN |
| intermedia | (SEQ | KKDQDIIIDNDQDILAIKTHWEKVNGDLNKTERLRELMTKHFPFLETAI |
| | ID No. | YSKNKEDKEEVKQEKQAKAQSFDSLKHCLFLFLEKLQETRNYYSHYK |
| | 95) | YSESTKEPMLEKELLKKMYNIFDDNIQLVIKDYQHNKDINPDEDFKHL |
| | | DRTEEDFNYYFTRNKKGNITESGLLFFVSLFLEKKDAIWMQQKLRGF |
| | | KDNRESKKKMTHEVFCRSRMLLPKLRLESTQTQDWILLDMLNELIRC |
| | | PKSLYERLQGEDREKFKVPFDPADEDYDAEQEPFKNTLVRHQDRFPY |
| | | FALRYFDYNEIFTNLRFQIDLGTFHFSIYKKLIGGQKEDRHLTHKLYGF |
| | | ERIQEFAKQNRPDEWKAIVKDLDTYETSNERYISETTPHYHLENQKIGI |
| | | RFRNDNDEIWPSLKTNGENNEKSKYKLDKQYQAEAFLSVHELLPMM |
| | | FYYLLLKKEEPNNDKKNASIVEGFIKREIRDMYKLYDAFANGEINNID |
| | | DLEKYCEDKGIPKRHLPKQMVAILYDEHKDMVKEAKRKQRKMVKD |
| | | TEKLLAALEKQTQEKTEDGGRNIRLLKSGEIARWLVNDMMRFQPVQ |
| | | KDNEGNPLNNSKANSTEYQMLQRSLALYNKEEKPTRYFRQVNLINSS |
| | | NPHPFLKWTKWEECNNILSFYRSYLTKKIEFLNKLKPEDWEKNQYFL |
| | | KLKEPKTNRETLVQGWKNGFNLPRGIFTEPIREWFKRHQNDSKEYEK |
| | | VEALDRVGLVTKVIPLFFKKEDSKDKEEDLKKDAQKEINNCVQPFYSF |
| | | PYNVGNIHKPDEKDFLHREERIELWDKKKDKFKGYKAKVKSKKLTD |
| | | KEKEEYRSYLEFQSWNKFERELRLVRNQDIVTWLLCTELIDKLKVEGL |
| | | NVEELKKLRLKDIDTDTAKQEKNNILNRVMPMQLPVTVYEIDDSHNI |
| | | VKDRPLHTVYIEETKTKLLKQGNFKALVKDRRLNGLFSFVDTSSEAEL |
| | | KSNPISKSLVEYELGEYQNARIETIKDMLLLEETLIEKYKNLPTDNFSD |
| | | MLNGWLEGKDEADKARFQNDVKLLVAVRNAFSHNQYPMRNRIAFA |
| | | NINPFSLSSADTSEEKKLDIANQLKDKTHKIIKRIIEIEKPIETKE |
| HMPREF6485_ | EFU31981 | MQKQDKLFVDRKKNAIFAFPKYITIMENKEKPEPIYYELTDKHFWAAF |
| 0083 | (SEQ | LNLARHNVYTTINHINRRLEIAELKDDGYMMGIKGSWNEQAKKLDK |
| [Prevotella | ID No. | KVRLRDLIMKHFPFLEAAAYEMTNSKSPNNKEQREKEQSEALSLNNL |
| buccae | 96) | KNVLFIFLEKLQVLRNYYSHYKYSEESPKPIFETSLLKNMYKVFDANV |
| ATCC | | RLVKRDYMHHENIDMQRDFTHLNRKKQVGRTKNIIDSPNFHYHFAD |
| 33574] | | KEGNMTIAGLLFFVSLFLDKKDAIWMQKKLKGFKDGRNLREQMTNE |
| | | VFCRSRISLPKLKLENVQTKDWMQLDMLNELVRCPKSLYERLREKDR |
| | | ESFKVPFDIFSDDYNAEEEPFKNTLVRHQDRFPYFVLRYFDLNEIFEQL |
| | | RFQIDLGTYHFSIYNKRIGDEDEVRHLTHHLYGFARIQDFAPQNQPEE |
| | | WRKLVKDLDHFETSQEPYISKTAPHYHLENEKIGIKFCSAHNNLFPSL |
| | | QTDKTCNGRSKFNLGTQFTAEAFLSVHELLPMMFYYLLLTKDYSRKE |
| | | SADKVEGIIRKEISNIYAIYDAFANNEINSIADLTRRLQNTNILQGHLPK |
| | | QMISILKGRQKDMGKEAERKIGEMIDDTQRRLDLLCKQTNQKIRIGKR |
| | | NAGLLKSGKIADWLVNDMMRFQPVQKDQNNIPINNSKANSTEYRML |
| | | QRALALFGSENFRLKAYFNQMNLVGNDNPHPFLAETQWEHQTNILSF |
| | | YRNYLEARKKYLKGLKPQNWKQYQHFLILKVQKTNRNTLVTGWKN |
| | | SFNLPRGIFTQPIREWFEKHNNSKRIYDQILSFDRVGFVAKAIPLYFAEE |
| | | YKDNVQPFYDYPFNIGNRLKPKKRQFLDKKERVELWQKNKELFKNY |
| | | PSEKKKTDLAYLDFLSWKKFERELRLIKNQDIVTWLMFKELFNMATV |
| | | EGLKIGEIHLRDIDTNTANEESNNILNRIMPMKLPVKTYETDNKGNILK |
| | | ERPLATFYIEETETKVLKQGNFKALVKDRRLNGLFSFAETTDLNLEEH |
| | | PISKLSVDLELIKYQTTRISIFEMTLGLEKKLIDKYSTLPTDSFRNMLER |
| | | WLQCKANRPELKNYVNSLIAVRNAFSHNQYPMYDATLFAEVKKFTL |
| | | FPSVDTKKIELNIAPQLLEIVGKAIKEIEKSENKN |
| HMPREF9144_ | EGQ18444 | MKEEEKGKTPVVSTYNKDDKHFWAAFLNLARHNVYITVNHINKILGE |
| 1146 | (SEQ | GEINRDGYENTLEKSWNEIKDINKKDRLSKLIIKHFPFLEVTTYQRNSA |
| [Prevotella | ID No. | DTTKQKEEKQAEAQSLESLKKSFFVFIYKLRDLRNHYSHYKHSKSLER |
| pallens | 97) | PKFEEDLQEKMYNIFDASIQLVKEDYKHNTDIKTEEDFKHLDRKGQFK |
| ATCC | | YSFADNEGNITESGLLFFVSLFLEKKDAIWVQKKLEGFKCSNESYQKM |
| 700821] | | TNEVFCRSRMLLPKLRLQSTQTQDWILLDMLNELIRCPKSLYERLREE |
| | | DRKKFRVPIEIADEDYDAEQEPFKNALVRHQDRFPYFALRYFDYNEIF |
| | | TNLRFQIDLGTYHFSIYKKQIGDYKESEIHLTHKLYGFERIQEFTKQNRP |
| | | DEWRKFVKTFNSFETSKEPYIPETTPHYHLENQKIGIRFRNDNDKIWPS |
| | | LKTNSEKNEKSKYKLDKSFQAEAFLSVHELLPMMFYYLLLKTENTDN |
| | | DNEIETKKKENKNDKQEKHKIEEIIENKITEIYALYDAFANGKINSIDKL |
| | | EEYCKGKDIEIGHLPKQMIAILKSEHKDMATEAKRKQEEMLADVQKS |
| | | LESLDNQINEEIENVERKNSSLKSGEIASWLVNDMMRFQPVQKDNEG |
| | | NPLNNSKANSTEYQMLQRSLALYNKEEKPTRYFRQVNLIESSNPHPFL |
| | | NNTEWEKCNNILSFYRSYLEAKKNFLESLKPEDWEKNQYFLMLKEPK |
| | | TNCETLVQGWKNGFNLPRGIFTEPIRKWFMEHRKNITVAELKRVGLV |
| | | AKVIPLFFSEEYKDSVQPFYNYLFNVGNINKPDEKNFLNCEERRELLR |
| | | KKKDEFKKMTDKEKEENPSYLEFQSWNKFERELRLVRNQDIVTWLLC |
| | | MELFNKKKIKELNVEKIYLKNINTNTTKKEKNTEEKNGEEKIIKEKNNI |
| | | LNRIMPMRLPIKVYGRENFSKNKKKKIRRNTFFTVYIEEKGTKLLKQG |
| | | NFKALERDRRLGGLFSFVKTHSKAESKSNTISKSRVEYELGEYQKARI |
| | | EIIKDMLALEETLIDKYNSLDTDNFHNMLTGWLKLKDEPDKASFQND |
| | | VDLLIAVRNAFSHNQYPMRNRIAFANINPFSLSSANTSEEKGLGIANQL |
| | | KDKTHKTIEKIIEIEKPIETKE |
| HMPREF9714_ | EHO08761 | MKDILTTDTTEKQNRFYSHKIADKYFFGGYFNLASNNIYEVFEEVNKR |
| 02132 | (SEQ | NTFGKLAKRDNGNLKNYIIHVFKDELSISDFEKRVAIFASYFPILETVD |
| [Myroides | ID No. | KKSIKERNRTIDLTLSQRIRQFREMLISLVTAVDQLRNFYTHYHHSEIVI |
| odoratimimus | 98) | ENKVLDFLNSSLVSTALHVKDKYLKTDKTKEFLKETIAAELDILIEAY |
| CCUG | | KKKQIEKKNTRFKANKREDILNAIYNEAFWSFINDKDKDKETVVAKG |
| 12901] | | ADAYFEKNEIHKSNDPDFALNISEKGIVYLLSFFLTNKEMDSLKANLTG |
| | | FKGKVDRESGNSIKYMATQRIYSFHTYRGLKQKIRTSEEGVKETLLMQ |
| | | MIDELSKVPNVVYQHLSTTQQNSFIEDWNEYYKDYEDDVETDDLSRV |
| | | IHPVIRKRYEDRFNYFAIRFLDEFFDFPTLRFQVHLGDYVHDRRTKQL |
| | | GKVESDRIIKEKVTVFARLKDINSAKANYFHSLEEQDKEELDNKWTLF |
| | | PNPSYDFPKEHTLQHQGEQKNAGKIGIYVKLRDTQYKEKAALEEARK |
| | | SLNPKERSATKASKYDIITQIIEANDNVKSEKPLVFTGQPIAYLSMNDIH |
| | | SMLFSLLTDNAELKKTPEEVEAKLIDQIGKQINEILSKDTDTKILKKYK |
| | | DNDLKETDTDKITRDLARDKEEIEKLILEQKQRADDYNYTSSTKFNID |
| | | KSRKRKHLLFNAEKGKIGVWLANDIKRFMTEEFKSKWKGYQHTELQ |
| | | KLFAYYDTSKSDLDLILSDMVMVKDYPIELIALVKKSRTLVDFLNKYL |
| | | EARLGYMENVITRVKNSIGTPQFKTVRKECFTFLKKSNYTVVSLDKQ |
| | | VERILSMPLFIERGFMDDKPTMLEGKSYQQHKEKFADWFVHYKENSN |
| | | YQNFYDTEVYEITTEDKREKAKVTKKIKQQQKNDVFTLMMVNYMLE |
| | | EVLKLSSNDRLSLNELYQTKEERIVNKQVAKDTQERNKNYIWNKVVD |
| | | LQLCEGLVRIDKVKLKDIGNFRKYENDSRVKEFLTYQSDIVWSAYLSN |
| | | EVDSNKLYVIERQLDNYESIRSKELLKEVQEIECSVYNQVANKESLKQ |
| | | SGNENFKQYVLQGLVPIGMDVREMLILSTDVKFIKEEIIQLGQAGEVE |
| | | QDLYSLIYIRNKFAHNQLPIKEFFDFCENNYRSISDNEYYAEYYMEIFR |
| | | SIKEKYTS |
| HMPREF9711_ | EKB06014 | MKDILTTDTTEKQNRFYSHKIADKYFFGGYFNLASNNIYEVFEEVNKR |
| 00870 | (SEQ | NTFGKLAKRDNGNLKNYIIHVFKDELSISDFEKRVAIFASYFPILETVD |
| [Myroides | ID No. | KKSIKERNRTIDLTLSQRIRQFREMLISLVTAVDQLRNFYTHYHHSEIVI |
| odoratimimus | 99) | ENKVLDFLNSSLVSTALHVKDKYLKTDKTKEFLKETIAAELDILIEAY |
| CCUG | | KKKQIEKKNTRFKANKREDILNAIYNEAFWSFINDKDKDKETVVAKG |
| 3837] | | ADAYFEKNHHKSNDPDFALNISEKGIVYLLSFFLTNKEMDSLKANLTG |
| | | FKGKVDRESGNSIKYMATQRIYSFHTYRGLKQKIRTSEEGVKETLLMQ |
| | | MIDELSKVPNVVYQHLSTTQQNSFIEDWNEYYKDYEDDVETDDLSRV |
| | | IHPVIRKRYEDRFNYFAIRFLDEFFDFPTLRFQVHLGDYVHDRRTKQL |
| | | GKVESDRIIKEKVTVFARLKDINSAKASYFHSLEEQDKEELDNKWTLF |
| | | PNPSYDFPKEHTLQHQGEQKNAGKIGIYVKLRDTQYKEKAALEEARK |
| | | SLNPKERSATKASKYDIITQIIEANDNVKSEKPLVFTGQPIAYLSMNDIH |
| | | SMLFSLLTDNAELKKTPEEVEAKLIDQIGKQINEILSKDTDTKILKKYK |
| | | DNDLKETDTDKITRDLARDKEEIEKLILEQKQRADDYNYTSSTKFNID |
| | | KSRKRKHLLFNAEKGKIGVWLANDIKRFMFKESKSKWKGYQHTELQ |
| | | KLFAYFDTSKSDLELILSDMVMVKDYPIELIDLVRKSRTLVDFLNKYL |
| | | EARLGYIENVITRVKNSIGTPQFKTVRKECFAFLKESNYTVASLDKQIE |
| | | RILSMPLFIERGFMDSKPTMLEGKSYQQHKEDFADWFVHYKENSNYQ |
| | | NFYDTEVYEIITEDKREQAKVTKKIKQQQKNDVFTLMMVNYMLEEV |
| | | LKLPSNDRLSLNELYQTKEERIVNKQVAKDTQERNKNYIWNKVVDLQ |
| | | LCEGLVRIDKVKLKDIGNFRKYENDSRVKEFLTYQSDIVWSGYLSNEV |
| | | DSNKLYVIERQLDNYESIRSKELLKEVQEIECIVYNQVANKESLKQSG |
| | | NENFKQYVLQGLLPRGTDVREMLILSTDVKFKKEEIMQLGQVREVEQ |
| | | DLYSLIYIRNKFAHNQLPIKEFFDFCENNYRPISDNEYYAEYYMEIFRSI |
| | | KEKYAS |
| HMPREF9699_ | EKB54193 | MENKTSLGNNIYYNPFKPQDKSYFAGYFNAAMENTDSVFRELGKRLK |
| 02005 | (SEQ | GKEYTSENFFDAIFKENISLVEYERYVKLLSDYFPMARLLDKKEVPIKE |
| [Bergeyella | ID No. | RKENFKKNFKGIIKAVRDLRNFYTHKEHGEVEITDEIFGVLDEMLKST |
| zoohelcum | 100) | VLTVKKKKVKTDKTKEILKKSIEKQLDILCQKKLEYLRDTARKIEEKR |
| ATCC | | RNQRERGEKELVAPFKYSDKRDDLIAAIYNDAFDVYIDKKKDSLKESS |
| 43767] | | KAKYNTKSDPQQEEGDLKIPISKNGVVFLLSLFLTKQEIHAFKSKIAGF |
| | | KATVIDEATVSEATVSHGKNSICFMATHEIFSHLAYKKLKRKVRTAEI |
| | | NYGEAENAEQLSVYAKETLMMQMLDELSKVPDVVYQNLSEDVQKT |
| | | FIEDWNEYLKENNGDVGTMEEEQVIHPVIRKRYEDKFNYFAIRFLDEF |
| | | AQFPTLRFQVHLGNYLHDSRPKENLISDRRIKEKITVFGRLSELEHKKA |
| | | LFIKNTETNEDREHYWEIFPNPNYDFPKENISVNDKDFPIAGSILDREK |
| | | QPVAGKIGIKVKLLNQQYVSEVDKAVKAHQLKQRKASKPSIQNIIEEI |
| | | VPINESNPKEAIVFGGQPTAYLSMNDIHSILYEFFDKWEKKKEKLEKK |
| | | GEKELRKEIGKELEKKIVGKIQAQIQQIIDKDTNAKILKPYQDGNSTAI |
| | | DKEKLIKDLKQEQNILQKLKDEQTVREKEYNDFIAYQDKNREINKVR |
| | | DRNHKQYLKDNLKRKYPEAPARKEVLYYREKGKVAVWLANDIKRF |
| | | MPTDFKNEWKGEQHSLLQKSLAYYEQCKEELKNLLPEKVFQHLPFKL |
| | | GGYFQQKYLYQFYTCYLDKRLEYISGLVQQAENFKSENKVFKKVENE |
| | | CFKFLKKQNYTHKELDARVQSILGYPIFLERGFMDEKPTIIKGKTFKGN |
| | | EALFADWFRYYKEYQNFQTFYDTENYPLVELEKKQADRKRKTKIYQ |
| | | QKKNDVFTLLMAKHIFKSVFKQDSIDQFSLEDLYQSREERLGNQERAR |
| | | QTGERNTNYIWNKTVDLKLCDGKITVENVKLKNVGDFIKYEYDQRV |
| | | QAFLKYEENIEWQAFLIKESKEEENYPYVVEREIEQYEKVRREELLKE |
| | | VHLIEEYILEKVKDKEILKKGDNQNFKYYILNGLLKQLKNEDVESYKV |
| | | FNLNTEPEDVNINQLKQEATDLEQKAFVLTYIRNKFAHNQLPKKEFW |
| | | DYCQEKYGKIEKEKTYAEYFAEVFKKEKEALIK |
| HMPREF9151_ | EKY00089 | MMEKENVQGSHIYYEPTDKCFWAAFYNLARHNAYLTIAHINSFVNSK |
| 01387 | (SEQ | KGINNDDKVLDIIDDWSKFDNDLLMGARLNKLILKHFPFLKAPLYQL |
| [Prevotella | ID No. | AKRKTRKQQGKEQQDYEKKGDEDPEVIQEAIANAFKMANVRKTLHA |
| saccharolytica | 101 | FLKQLEDLRNHFSHYNYNSPAKKMEVKFDDGFCNKLYYVFDAALQM |
| F0055] | | VKDDNRMNPEINMQTDFEHLVRLGRNRKIPNTFKYNFTNSDGTINNN |
| | | GLLFFVSLFLEKRDAIWMQKKIKGFKGGTENYMRMTNEVFCRNRMVI |
| | | PKLRLETDYDNHQLMFDMLNELVRCPLSLYKRLKQEDQDKFRVPIEF |
| | | LDEDNEADNPYQENANSDENPTEETDPLKNTLVRHQHRFPYFVLRYF |
| | | DLNEVFKQLRFQINLGCYHFSIYDKTIGERTEKRHLTRTLFGFDRLQNF |
| | | SVKLQPEHWKNMVKHLDTEESSDKPYLSDAMPHYQIENEKIGIHFLK |
| | | TDTEKKETVWPSLEVEEVSSNRNKYKSEKNLTADAFLSTHELLPMMF |
| | | YYQLLSSEEKTRAAAGDKVQGVLQSYRKKIFDIYDDFANGTINSMQK |
| | | LDERLAKDNLLRGNMPQQMLAILEHQEPDMEQKAKEKLDRLITETKK |
| | | RIGKLEDQFKQKVRIGKRRADLPKVGSIADWLVNDMMRFQPAKRNA |
| | | DNTGVPDSKANSTEYRLLQEALAFYSAYKDRLEPYFRQVNLIGGTNP |
| | | HPFLHRVDWKKCNHLLSFYHDYLEAKEQYLSHLSPADWQKHQHFLL |
| | | LKVRKDIQNEKKDWKKSLVAGWKNGFNLPRGLFTESIKTWFSTDAD |
| | | KVQITDTKLFENRVGLIAKLIPLYYDKVYNDKPQPFYQYPFNINDRYK |
| | | PEDTRKRFTAASSKLWNEKKMLYKNAQPDSSDKIEYPQYLDFLSWKK |
| | | LERELRMLRNQDMMVWLMCKDLFAQCTVEGVEFADLKLSQLEVDV |
| | | NVQDNLNVLNNVSSMILPLSVYPSDAQGNVLRNSKPLHTVYVQENNT |
| | | KLLKQGNFKSLLKDRRLNGLFSFIAAEGEDLQQHPLTKNRLEYELSIY |
| | | QTMRISVFEQTLQLEKAILTRNKTLCGNNFNNLLNSWSEHRTDKKTL |
| | | QPDIDFLIAVRNAFSHNQYPMSTNTVMQGIEKFNIQTPKLEEKDGLGIA |
| | | SQLAKKTKDAASRLQNIINGGTN |
| A343_1752 | EOA10535 | MTEQNEKPYNGTYYTLEDKHFWAAFFNLARHNAYITLTHIDRQLAYS |
| [Porphyromonas | (SEQ | KADITNDEDILFFKGQWKNLDNDLERKARLRSLILKHFSFLEGAAYGK |
| gingivalis | ID No. | KLFESQSSGNKSSKKKELTKKEKEELQANALSLDNLKSILFDFLQKLK |
| JCVISC001] | 102) | DFRNYYSHYRHPESSELPLFDGNMLQRLYNVFDVSVQRVKRDHEHN |
| | | DKVDPHRHFNHLVRKGKKDRCGNNDNPFFKHHFVDREEKVTEAGLL |
| | | FFVSLFLEKRDAIWMQKKIRGFKGGTETYQQMTNEVFCRSRISLPKLK |
| | | LESLRTDDWMLLDMLNELVRCPKSLYDRLREEDRARFRVPVDILSDE |
| | | DDTDGTEEDPFKNTLVRHQDRFPYFALRYFDLKKVFTSLRFHIDLGTY |
| | | HFAIYKKNIGEQPEDRHLTRNLYGFGRIQDFAEEHRPEEWKRLVRDLD |
| | | YFETGDKPYITQTTPHYHIEKGKIGLRFVPEGQLLWPSPEVGATRTGRS |
| | | KYAQDKRFTAEAFLSVHELMPMMFYYFLLREKYSEEASAERVQGRIK |
| | | RVIEDVYAVYDAFARGEIDTLDRLDACLADKGIRRGHLPRQMIAILSQ |
| | | EHKDMEEKVRKKLQEMIADTDHRLDMLDRQTDRKIRIGRKNAGLPK |
| | | SGVIADWLVRDMMRFQPVAKDTSGKPLNNSKANSTEYRMLQRALAL |
| | | FGGEKERLTPYFRQMNLTGGNNPHPFLHETRWESHTNILSFYRSYLKA |
| | | RKAFLQSIGRSDRVENHRFLLLKEPKTDRQTLVAGWKGEFHLPRGIFT |
| | | EAVRDCLIEMGLDEVGSYKEVGFMAKAVPLYFERACKDRVQPFYDY |
| | | PFNVGNSLKPKKGRFLSKEKRAEEWESGKERFRDLEAWSHSAARRIE |
| | | DAFAGIENASRENKKKIEQLLQDLSLWETFESKLKVKADKINIAKLKK |
| | | EILEAKEHPYLDFKSWQKFERELRLVKNQDIITWMMCRDLMEENKVE |
| | | GLDTGTLYLKDIRTDVHEQGSLNVLNRVKPMRLPVVVYRADSRGHV |
| | | HKEQAPLATVYIEERDTKLLKQGNFKSFVKDRRLNGLFSFVDTGALA |
| | | MEQYPISKLRVEYELAKYQTARVCAFEQTLELEESLLTRYPHLPDKNF |
| | | RKMLESWSDPLLDKWPDLHGNVRLLIAVRNAFSHNQYPMYDETLFSS |
| | | IRKYDPSSPDAIEERMGLNIAHRLSEEVKQAKEMVERIIQA |
| HMPREF1981_ | ERI81700 | MESIKNSQKSTGKTLQKDPPYFGLYLNMALLNVRKVENHIRKWLGD |
| 03090 | (SEQ | VALLPEKSGFHSLLTTDNLSSAKWTRFYYKSRKFLPFLEMFDSDKKSY |
| [Bacteroides | ID No. | ENRRETTECLDTIDRQKISSLLKEVYGKLQDIRNAFSHYHIDDQSVKHT |
| pyogenes | 103) | ALIISSEMHRFIENAYSFALQKTRARFTGVFVETDFLQAEEKGDNKKFF |
| F0041] | | AIGGNEGIKLKDNALIFLICLFLDREEAFKFLSRATGFKSTKEKGFLAV |
| | | RETFCALCCRQPHERLLSVNPREALLMDMLNELNRCPDILFEMLDEK |
| | | DQKSFLPLLGEEEQAHILENSLNDELCEAIDDPFEMIASLSKRVRYKNR |
| | | FPYLMLRYIEEKNLLPFIRFRIDLGCLELASYPKKMGEENNYERSVTDH |
| | | AMAFGRLTDFHNEDAVLQQITKGITDEVRFSLYAPRYAIYNNKIGFVR |
| | | TGGSDKISFPTLKKKGGEGHCVAYTLQNTKSFGFISIYDLRKILLLSFL |
| | | DKDKAKNIVSGLLEQCEKHWKDLSENLFDAIRTELQKEFPVPLIRYTL |
| | | PRSKGGKLVSSKLADKQEKYESEFERRKEKLTEILSEKDFDLSQIPRRM |
| | | IDEWLNVLPTSREKKLKGYVETLKLDCRERLRVFEKREKGEHPVPPRI |
| | | GEMATDLAKDIIRMVIDQGVKQRITSAYYSEIQRCLAQYAGDDNRRH |
| | | LDSIIRELRLKDTKNGHPFLGKVLRPGLGHTEKLYQRYFEEKKEWLEA |
| | | TFYPAASPKRVPRFVNPPTGKQKELPLIIRNLMKERPEWRDWKQRKN |
| | | SHPIDLPSQLFENEICRLLKDKIGKEPSGKLKWNEMFKLYWDKEFPNG |
| | | MQRFYRCKRRVEVFDKVVEYEYSEEGGNYKKYYEALIDEVVRQKISS |
| | | SKEKSKLQVEDLTLSVRRVFKRAINEKEYQLRLLCEDDRLLFMAVRD |
| | | LYDWKEAQLDLDKIDNMLGEPVSVSQVIQLEGGQPDAVIKAECKLKD |
| | | VSKLMRYCYDGRVKGLMPYFANHEATQEQVEMELRHYEDHRRRVF |
| | | NWVFALEKSVLKNEKLRRFYEESQGGCEHRRCIDALRKASLVSEEEY |
| | | EFLVHIRNKSAHNQFPDLEIGKLPPNVTSGFCECIWSKYKAIICRIIPFID |
| | | PERRFFGKLLEQK |
| HMPREF1553_ | ERJ65637 | MNTVPASENKGQSRTVEDDPQYFGLYLNLARENLIEVESHVRIKFGK |
| 02065 | (SEQ | KKLNEESLKQSLLCDHLLSVDRWTKVYGHSRRYLPFLHYFDPDSQIE |
| [Porphyromonas | ID No. | KDHDSKTGVDPDSAQRLIRELYSLLDFLRNDFSHNRLDGTTFEHLEVS |
| gingivalis | 104) | PDISSFITGTYSLACGRAQSRFADFFKPDDFVLAKNRKEQLISVADGKE |
| F0568] | | CLTVSGLAFFICLFLDREQASGMLSRIRGFKRTDENWARAVHETFCDL |
| | | CIRHPHDRLESSNTKEALLLDMLNELNRCPRILYDMLPEEERAQFLPA |
| | | LDENSMNNLSENSLNEESRLLWDGSSDWAEALTKRIRHQDRFPYLML |
| | | RFIEEMDLLKGIRFRVDLGEIELDSYSKKVGRNGEYDRTITDHALAFG |
| | | KLSDFQNEEEVSRMISGEASYPVRFSLFAPRYAIYDNKIGYCHTSDPVY |
| | | PKSKTGEKRALSNPRSMGFISVHDLRKLLLMELLCEGSFSRMQSDFLR |
| | | KANRILDETAEGKLQFSALFPEMRHRFIPPQNPKSKDRREKAETTLEK |
| | | YKQEIKGRKDKLNSQLLSAFDMDQRQLPSRLLDEWMNIRPASHSVKL |
| | | RTYVKQLNEDCRLRLQKFRKDGDGKARAIPLVGEMATFLSQDIVRMII |
| | | SEETKKLITSAYYNEMQRSLAQYAGEENRHQFRAIVAELRLLDPSSGH |
| | | PFLSATMETAHRYTEDFYKCYLEKKREWLAKTFYRPEQDENTKRRIS |
| | | VFFVPDGEARKLLPLLIRRRMKEQNDLQDWIRNKQAHPIDLPSHLFDS |
| | | KIMELLKVKDGKKKWNEAFKDWWSTKYPDGMQPFYGLRRELNIHG |
| | | KSVSYIPSDGKKFADCYTHLMEKTVQDKKRELRTAGKPVPPDLAADI |
| | | KRSFHRAVNEREFMLRLVQEDDRLMLMAINKMMTDREEDILPGLKNI |
| | | DSILDEENQFSLAVHAKVLEKEGEGGDNSLSLVPATIEIKSKRKDWSK |
| | | YIRYRYDRRVPGLMSHFPEHKATLDEVKTLLGEYDRCRIKIFDWAFAL |
| | | EGAIMSDRDLKPYLHESSSREGKSGEHSTLVKMLVEKKGCLTPDESQ |
| | | YLILIRNKAAHNQFPCAAEMPLIYRDVSAKVGSIEGSSAKDLPEGSSLV |
| | | DSLWKKYEMIIRKILPILDPENRFFGKLLNNMSQPINDL |
| HMPREF1988_ | ERJ81987 | MNTVPASENKGQSRTVEDDPQYFGLYLNLARENLIEVESHVRIKFGK |
| 01768 | (SEQ | KKLNEESLKQSLLCDHLLSVDRWTKVYGHSRRYLPFLHYFDPDSQIE |
| [Porphyromonas | ID No. | KDHDSKTGVDPDSAQRLIRELYSLLDFLRNDFSHNRLDGTTFEHLEVS |
| gingivalis | 105) | PDISSFITGTYSLACGRAQSRFADFFKPDDFVLAKNRKEQLISVADGKE |
| F0185] | | CLTVSGLAFFICLFLDREQASGMLSRIRGFKRTDENWARAVHETFCDL |
| | | CIRHPHDRLESSNTKEALLLDMLNELNRCPRILYDMLPEEERAQFLPA |
| | | LDENSMNNLSENSLNEESRLLWDGSSDWAEALTKRIRHQDRFPYLML |
| | | RFIEEMDLLKGIRFRVDLGEIELDSYSKKVGRNGEYDRTITDHALAFG |
| | | KLSDFQNEEEVSRMISGEASYPVRFSLFAPRYAIYDNKIGYCHTSDPVY |
| | | PKSKTGEKRALSNPQSMGFISVHDLRKLLLMELLCEGSFSRMQSGFLR |
| | | KANRILDETAEGKLQFSALFPEMRHRFIPPQNPKSKDRREKAETTLEK |
| | | YKQEIKGRKDKLNSQLLSAFDMNQRQLPSRLLDEWMNIRPASHSVKL |
| | | RTYVKQLNEDCRLRLRKFRKDGDGKARAIPLVGEMATFLSQDIVRMII |
| | | SEETKKLITSAYYNEMQRSLAQYAGEENRRQFRAIVAELHLLDPSSGH |
| | | PFLSATMETAHRYTEDFYKCYLEKKREWLAKTFYRPEQDENTKRRIS |
| | | VFFVPDGEARKLLPLLIRRRMKEQNDLQDWIRNKQAHPIDLPSHLFDS |
| | | KIMELLKVKDGKKKWNEAFKDWWSTKYPDGMQPFYGLRRELNIHG |
| | | KSVSYIPSDGKKFADCYTHLMEKTVQDKKRELRTAGKPVPPDLAADI |
| | | KRSFHRAVNEREFMLRLVQEDDRLMLMAINKMMTDREEDILPGLKNI |
| | | DSILDEENQFSLAVHAKVLEKEGEGGDNSLSLVPATIEIKSKRKDWSK |
| | | YIRYRYDRRVPGLMSHFPEHKATLDEVKTLLGEYDRCRIKIFDWAFAL |
| | | EGAIMSDRDLKPYLHESSSREGKSGEHSTLVKMLVEKKGCLTPDESQ |
| | | YLILIRNKAAHNQFPCAAEMPLIYRDVSAKVGSIEGSSAKDLPEGSSLV |
| | | DSLWKKYEMIIRKILPILDHENRFFGKLLNNMSQPINDL |
| HMPREF1990_ | ERJ87335 | MNTVPASENKGQSRTVEDDPQYFGLYLNLARENLIEVESHVRIKFGK |
| 01800 | (SEQ | KKLNEESLKQSLLCDHLLSVDRWTKVYGHSRRYLPFLHYFDPDSQIE |
| [Porphyromonas | ID No. | KDHDSKTGVDPDSAQRLIRELYSLLDFLRNDFSHNRLDGTTFEHLEVS |
| gingivalis | 106) | PDISSFITGTYSLACGRAQSRFADFFKPDDFVLAKNRKEQLISVADGKE |
| W4087] | | CLTVSGLAFFICLFLDREQASGMLSRIRGFKRTDENWARAVHETFCDL |
| | | CIRHPHDRLESSNTKEALLLDMLNELNRCPRILYDMLPEEERAQFLPA |
| | | LDENSMNNLSENSLNEESRLLWDGSSDWAEALTKRIRHQDRFPYLML |
| | | RFIEEMDLLKGIRFRVDLGEIELDSYSKKVGRNGEYDRTITDHALAFG |
| | | KLSDFQNEEEVSRMISGEASYPVRFSLFAPRYAIYDNKIGYCHTSDPVY |
| | | PKSKTGEKRALSNPRSMGFISVHDLRKLLLMELLCEGSFSRMQSDFLR |
| | | KANRILDETAEGKLQFSALFPEMRHRFIPPQNPKSKDRREKAETTLEK |
| | | YKQEIKGRKDKLNSQLLSAFDMDQRQLPSRLLDEWMNIRPASHSVKL |
| | | RTYVKQLNEDCRLRLQKFRKDGDGKARAIPLVGEMATFLSQDIVRMII |
| | | SEETKKLITSAYYNEMQRSLAQYAGEENRHQFRAIVAELRLLDPSSGH |
| | | PFLSATMETAHRYTEDFYKCYLEKKREWLAKTFYRPEQDENTKRRIS |
| | | VFFVPDGEARKLLPLLIRRRMKEQNDLQDWIRNKQAHPIDLPSHLFDS |
| | | KVMELLKVKDGKKKWNEAFKDWWSTKYPDGMQPFYGLRRELNIHG |
| | | KSVSYIPSDGKKFADCYTHLMEKTVRDKKRELRTAGKPVPPDLAAYI |
| | | KRSFHRAVNEREFMLRLVQEDDRLMLMAINKIMTDREEDILPGLKNI |
| | | DSILDKENQFSLAVHAKVLEKEGEGGDNSLSLVPATIEIKSKRKDWSK |
| | | YIRYRYDRRVPGLMSHFPEHKATLDEVKTLLGEYDRCRIKIFDWAFAL |
| | | EGAIMSDRDLKPYLHESSSREGKSGEHSTLVKMLVEKKGCLTPDESQ |
| | | YLILIRNKAAHNQFPCAAEIPLIYRDVSAKVGSIEGSSAKDLPEGSSLV |
| | | DSLWKKYEMIIRKILPILDPENRFFGKLLNNMSQPINDL |
| M573_ | KJJ86756 | MKMEDDKKTTESTNMLDNKHFWAAFLNLARHNVYITVNHINKVLEL |
| 117042 | (SEQ | KNKKDQDIIIDNDQDILAIKTHWEKVNGDLNKTERLRELMTKHFPFLE |
| [Prevotella | ID No. | TAIYTKNKEDKEEVKQEKQAEAQSLESLKDCLFLFLEKLQEARNYYS |
| intermedia | 107) | HYKYSESTKEPMLEEGLLEKMYNIFDDNIQLVIKDYQHNKDINPDEDF |
| ZT] | | KHLDRKGQFKYSFADNEGNITESGLLFFVSLFLEKKDAIWMQQKLTG |
| | | FKDNRESKKKMTHEVFCRRRMLLPKLRLESTQTQDWILLDMLNELIR |
| | | CPKSLYERLQGEYRKKFNVPFDSADEDYDAEQEPFKNTLVRHQDRFP |
| | | YFALRYFDYNEIFTNLRFQIDLGTYHFSIYKKLIGGQKEDRHLTHKLY |
| | | GFERIQEFAKQNRPDEWKALVKDLDTYETSNERYISETTPHYHLENQK |
| | | IGIRFRNGNKEIWPSLKTNGENNEKSKYKLDKPYQAEAFLSVHELLPM |
| | | MFYYLLLKKEEPNNDKKNASIVEGFIKREIRDMYKLYDAFANGEINNI |
| | | GDLEKYCEDKGIPKRHLPKQMVAILYDEPKDMVKEAKRKQKEMVKD |
| | | TKKLLATLEKQTQEEIEDGGRNIRLLKSGEIARWLVNDMMRFQPVQK |
| | | DNEGNPLNNSKANSTEYQMLQRSLALYNKEEKPTRYFRQVNLINSSN |
| | | PHPFLKWTKWEECNNILSFYRNYLTKKIEFLNKLKPEDWEKNQYFLK |
| | | LKEPKTNRETLVQGWKNGFNLPRGIFTEPIREWFKRHQNDSKEYEKV |
| | | EALKRVGLVTKVIPLFFKEEYFKEDAQKEINNCVQPFYSFPYNVGNIH |
| | | KPDEKDFLPSEERKKLWGDKKDKFKGYKAKVKSKKLTDKEKEEYRS |
| | | YLEFQSWNKFERELRLVRNQDIVTWLLCTELIDKMKVEGLNVEELQK |
| | | LRLKDIDTDTAKQEKNNILNRIMPMQLPVTVYEIDDSHNIVKDRPLHT |
| | | VYIEETKTKLLKQGNFKALVKDRRLNGLFSFVDTSSKAELKDKPISKS |
| | | VVEYELGEYQNARIETIKDMLLLEKTLIKKYEKLPTDNFSDMLNGWL |
| | | EGKDESDKARFQNDVKLLVAVRNAFSHNQYPMRNRIAFANINPFSLS |
| | | SADISEEKKLDIANQLKDKTHKIIKKIIEIEKPIETKE |
| A2033_ | OFX18020.1 | MENQTQKGKGIYYYYTKNEDKHYFGSFLNLANNNIEQIIEEFRIRLSL |
| 10205 | (SEQ | KDEKNIKEIINNYFTDKKSYTDWERGINILKEYLPVIDYLDLAITDKEF |
| [Bacteroidetes | ID No. | EKIDLKQKETAKRKYFRTNFSLLIDTIIDLRNFYTHYFHKPISINPDVAK |
| bacterium | 108) | FLDKNLLNVCLDIKKQKMKTDKTKQALKDGLDKELKKLIELKKAEL |
| GWA2_31_ | | KEKKIKTWNITENVEGAVYNDAFNHMVYKNNAGVTILKDYHKSILPD |
| 9] | | DKIDSELKLNFSISGLVFLLSMFLSKKEIEQFKSNLEGFKGKVIGENGE |
| | | YEISKFNNSLKYMATHWIFSYLTFKGLKQRVKNTFDKETLLMQMIDE |
| | | LNKVPHEVYQTLSKEQQNEFLEDINEYVQDNEENKKSMENSIVVHPVI |
| | | RKRYDDKFNYFAIRFLDEFANFPTLKFFVTAGNFVHDKREKQIQGSML |
| | | TSDRMIKEKINVFGKLTEIAKYKSDYFSNENTLETSEWELFPNPSYLLI |
| | | QNNIPVHIDLIHNTEEAKQCQIAIDRIKCTTNPAKKRNTRKSKEEIIKIIY |
| | | QKNKNIKYGDPTALLSSNELPALIYELLVNKKSGKELENIIVEKIVNQY |
| | | KTIAGFEKGQNLSNSLITKKLKKSEPNEDKINAEKIILAINRELEITENK |
| | | LNIIKNNRAEFRTGAKRKHIFYSKELGQEATWIAYDLKRFMPEASRKE |
| | | WKGMHSELQKFLAFYDRNKNDAKALLNMFWNFDNDQLIGNDLNS |
| | | AFREFHFDKFYEKYLIKRDEILEGFKSFISNFKDEPKLLKKGIKDIYRVF |
| | | DKRYYIIKSTNAQKEQLLSKPICLPRGIFDNKPTYIEGVKVESNSALFA |
| | | DWYQYTYSDKHEFQSFYDMPRDYKEQFEKFELNNIKSIQNKKNLNKS |
| | | DKFIYFRYKQDLKIKQIKSQDLFIKLMVDELFNVVFKNNIELNLKKLY |
| | | QTSDERFKNQLIADVQKNREKGDTSDNKMNENFIWNMTIPLSLCNGQ |
| | | IEEPKVKLKDIGKFRKLETDDKVIQLLEYDKSKVWKKLEIEDELENMP |
| | | NSYERIRREKLLKGIQEFEHFLLEKEKFDGINHPKHFEQDLNPNFKTYV |
| | | INGVLRKNSKLNYTEIDKLLDLEHISIKDIETSAKEIHLAYFLIHVRNKF |
| | | GHNQLPKLEAFELMKKYYKKNNEETYAEYFHKVSSQIVNEFKNSLEK |
| | | HS |
| SAMN05421542_ | SDI27289.1 | MEKTQTGLGIYYDHTKLQDKYFFGGFFNLAQNNIDNVIKAFIIKFFPER |
| 0666 | (SEQ | KDKDINIAQFLDICFKDNDADSDFQKKNKFLRIHFPVIGFLTSDNDKAG |
| [Chryseo- | ID No. | FKKKFALLLKTISELRNFYTHYYHKSIEFPSELFELLDDIFVKTTSEIKK |
| bacterium | 109) | LKKKDDKTQQLLNKNLSEEYDIRYQQQIERLKELKAQGKRVSLTDET |
| jejuense] | | AIRNGVFNAAFNHLIYRDGENVKPSRLYQSSYSEPDPAENGISLSQNSI |
| | | LFLLSMFLERKETEDLKSRVKGFKAKIIKQGEEQISGLKFMATHWVFS |
| | | YLCFKGIKQKLSTEFHEETLLIQIIDELSKVPDEVYSAFDSKTKEKFLED |
| | | INEYMKEGNADLSLEDSKVIHPVIRKRYENKFNYFAIRFLDEYLSSTSL |
| | | KFQVHVGNYVHDRRVKHINGTGFQTERIVKDRIKVFGRLSNISNLKA |
| | | DYIKEQLELPNDSNGWEIFPNPSYIFIDNNVPIHVLADEATKKGIELFKD |
| | | KRRKEQPEELQKRKGKISKYNIVSMIYKEAKGKDKLRIDEPLALLSLN |
| | | EIPALLYQILEKGATPKDIELIIKNKLTERFEKIKNYDPETPAPASQISKR |
| | | LRNNTTAKGQEALNAEKLSLLIEREIENTETKLSSIEEKRLKAKKEQRR |
| | | NTPQRSIFSNSDLGRIAAWLADDIKRFMPAEQRKNWKGYQHSQLQQS |
| | | LAYFEKRPQEAFLLLKEGWDTSDGSSYWNNWVMNSFLENNHFEKFY |
| | | KNYLMKRVKYFSELAGNIKQHTHNTKFLRKFIKQQMPADLFPKRHYI |
| | | LKDLETEKNKVLSKPLVFSRGLFDNNPTFIKGVKVTENPELFAEWYSY |
| | | GYKTEHVFQHFYGWERDYNELLDSELQKGNSFAKNSIYYNRESQLDL |
| | | IKLKQDLKIKKIKIQDLFLKRIAEKLFENVFNYPTTLSLDEFYLTQEERA |
| | | EKERIALAQSLREEGDNSPNIIKDDFIWSKTIAFRSKQIYEPAIKLKDIG |
| | | KFNRFVLDDEESKASKLLSYDKNKIWNKEQLERELSIGENSYEVIRRE |
| | | KLFKEIQNLELQILSNWSWDGINHPREFEMEDQKNTRHPNFKMYLVN |
| | | GILRKNINLYKEDEDFWLESLKENDFKTLPSEVLETKSEMVQLLFLVIL |
| | | IRNQFAHNQLPEIQFYNFIRKNYPEIQNNTVAELYLNLIKLAVQKLKDN |
| | | S |
| SAMN05444360_ | SHM52812.1 | MNTRVTGMGVSYDHTKKEDKHFFGGFLNLAQDNITAVIKAFCIKFDK |
| 11366 | (SEQ | NPMSSVQFAESCFTDKDSDTDFQNKVRYVRTHLPVIGYLNYGGDRNT |
| [Chryseo- | ID No. | FRQKLSTLLKAVDSLRNFYTHYYHSPLALSTELFELLDTVFASVAVEV |
| bacterium | 110) | KQHKMKDDKTRQLLSKSLAEELDIRYKQQLERLKELKEQGKNIDLRD |
| carnipullorum] | | EAGIRNGVLNAAFNHLIYKEGEIAKPTLSYSSFYYGADSAENGITISQS |
| | | GLLFLLSMFLGKKEIEDLKSRIRGFKAKIVRDGEENISGLKFMATHWIF |
| | | SYLSFKGMKQRLSTDFHEETLLIQIIDELSKVPDEVYHDFDTATREKFV |
| | | EDINEYIREGNEDFSLGDSTIIHPVIRKRYENKFNYFAVRFLDEFIKFPSL |
| | | RFQVHLGNFVHDRRIKDIHGTGFQTERVVKDRIKVFGKLSETSSLKTEY |
| | | IEKELDLDSDTGWEIFPNPSYVFIDNNIPIYISTNKTFKNGSSEFIKLRRK |
| | | EKPEEMKMRGEDKKEKRDIASMIGNAGSLNSKTPLAMLSLNEMPALL |
| | | YEILVKKTTPEEIELIIKEKLDSHFENIKNYDPEKPLPASQISKRLRNNTT |
| | | DKGKKVINPEKLIHLINKEIDATEAKFALLAKNRKELKEKFRGKPLRQ |
| | | TIFSNMELGREATWLADDIKRFMPDILRKNWKGYQHNQLQQSLAFFN |
| | | SRPKEAFTILQDGWDFADGSSFWNGWIINSFVKNRSFEYFYEAYFEGR |
| | | KEYFSSLAENIKQHTSNHRNLRRFIDQQMPKGLFENRHYLLENLETEK |
| | | NKILSKPLVFPRGLFDTKPTFIKGIKVDEQPELFAEWYQYGYSTEHVFQ |
| | | NFYGWERDYNDLLESELEKDNDFSKNSIHYSRTSQLELIKLKQDLKIK |
| | | KIKIQDLFLKLIAGHIFENIFKYPASFSLDELYLTQEERLNKEQEALIQS |
| | | QRKEGDHSDNIIKDNFIGSKTVTYESKQISEPNVKLKDIGKFNRFLLDD |
| | | KVKTLLSYNEDKVWNKNDLDLELSIGENSYEVIRREKLFKKIQNFELQ |
| | | TLTDWPWNGTDHPEEFGTTDNKGVNHPNFKMYVVNGILRKHTDWF |
| | | KEGEDNWLENLNETHFKNLSFQELETKSKSIQTAFLIIMIRNQFAHNQL |
| | | PAVQFFEFIQKKYPEIQGSTTSELYLNFINLAVVELLELLEK |
| SAMN05421786_ | SIS70481.1 | METQILGNGISYDHTKTEDKHFFGGFLNTAQNNIDLLIKAYISKFESSP |
| 1011119 | (SEQ | RKLNSVQFPDVCFKKNDSDADFQHKLQFIRKHLPVIQYLKYGGNREV |
| [Chryseo- | ID No. | LKEKFRLLLQAVDSLRNFYTHFYHKPIQLPNELLTLLDTIFGEIGNEVR |
| bacterium | 111) | QNKMKDDKTRHLLKKNLSEELDFRYQEQLERLRKLKSEGKKVDLRD |
| ureilyticum] | | TEAIRNGVLNAAFNHLIFKDAEDFKPTVSYSSYYYDSDTAENGISISQS |
| | | GLLFLLSMFLGRREMEDLKSRVRGFKARIIKHEEQHVSGLKFMATHW |
| | | VFSEFCFKGIKTRLNADYHEETLLIQLIDELSKVPDELYRSFDVATRER |
| | | FIEDINEYIRDGKEDKSLIESKIVHPVIRKRYESKFNYFAIRFLDEFVNFP |
| | | TLRFQVHAGNYVHDRRIKSIEGTGFKTERLVKDRIKVFGKLSTISSLKA |
| | | EYLAKAVNITDDTGWELLPHPSYVFIDNNIPIHLTVDPSFKNGVKEYQ |
| | | EKRKLQKPEEMKNRQGGDKMHKPAISSKIGKSKDINPESPVALLSMN |
| | | EIPALLYEILVKKASPEEVEAKIRQKLTAVFERIRDYDPKVPLPASQVS |
| | | KRLRNNTDTLSYNKEKLVELANKEVEQTERKLALITKNRRECREKVK |
| | | GKFKRQKVFKNAELGTEATWLANDIKRFMPEEQKKNWKGYQHSQL |
| | | QQSLAFFESRPGEARSLLQAGWDFSDGSSFWNGWVMNSFARDNTFD |
| | | GFYESYLNGRMKYFLRLADNIAQQSSTNKLISNFIKQQMPKGLFDRRL |
| | | YMLEDLATEKNKILSKPLIFPRGIFDDKPTFKKGVQVSEEPEAFADWY |
| | | SYGYDVKHKFQEFYAWDRDYEELLREELEKDTAFTKNSIHYSRESQIE |
| | | LLAKKQDLKVKKVRIQDLYLKLMAEFLFENVFGHELALPLDQFYLTQ |
| | | EERLKQEQEAIVQSQRPKGDDSPNIVKENFIWSKTIPFKSGRVFEPNVK |
| | | LKDIGKFRNLLTDEKVDILLSYNNTEIGKQVIENELIIGAGSYEFIRREQ |
| | | LFKEIQQMKRLSLRSVRGMGVPIRLNLK |
| Prevotella | WP_ | MQKQDKLFVDRKKNAIFAFPKYITIMENQEKPEPIYYELTDKHFWAAF |
| buccae | 004343581 | LNLARHNVYTTINHINRRLEIAELKDDGYMMDIKGSWNEQAKKLDK |
| | (SEQ | KVRLRDLIMKHFPFLEAAAYEITNSKSPNNKEQREKEQSEALSLNNLK |
| | ID No. | NVLFIFLEKLQVLRNYYSHYKYSEESPKPIFETSLLKNMYKVFDANVR |
| | 112) | LVKRDYMEIHENIDMQRDFTHLNRKKQVGRTKNIIDSPNFHYHFADKE |
| | | GNMTIAGLLFFVSLFLDKKDAIWMQKKLKGFKDGRNLREQMTNEVF |
| | | CRSRISLPKLKLENVQTKDWMQLDMLNELVRCPKSLYERLREKDRES |
| | | FKVPFDIFSDDYDAEEEPFKNTLVRHQDRFPYFVLRYFDLNEIFEQLRF |
| | | QIDLGTYHFSIYNKRIGDEDEVRHLTHHLYGFARIQDFAQQNQPEVWR |
| | | KLVKDLDYFEASQEPYIPKTAPHYHLENEKIGIKFCSTHNNLFPSLKTE |
| | | KTCNGRSKFNLGTQFTAEAFLSVHELLPMMFYYLLLTKDYSRKESAD |
| | | KVEGIIRKEISNIYAIYDAFANGEINSIADLTCRLQKTNILQGHLPKQMI |
| | | SILEGRQKDMEKEAERKIGEMIDDTQRRLDLLCKQTNQKIRIGKRNAG |
| | | LLKSGKIADWLVNDMMRFQPVQKDQNNIPINNSKANSTEYRMLQRA |
| | | LALFGSENFRLKAYFNQMNLVGNDNPHPFLAETQWEHQTNILSFYRN |
| | | YLEARKKYLKGLKPQNWKQYQHFLILKVQKTNRNTLVTGWKNSFNL |
| | | PRGIFTQPIREWFEKHNNSKRIYDQILSFDRVGFVAKAIPLYFAEEYKD |
| | | NVQPFYDYPFNIGNKLKPQKGQFLDKKERVELWQKNKELFKNYPSEK |
| | | KKTDLAYLDFLSWKKFERELRLIKNQDIVTWLMFKELFNMATVEGLK |
| | | IGEIHLRDIDTNTANEESNNILNRIMPMKLPVKTYETDNKGNILKERPL |
| | | ATFYIEETETKVLKQGNFKVLAKDRRLNGLLSFAETTDIDLEKNPITKL |
| | | SVDHELIKYQTTRISIFEMTLGLEKKLINKYPTLPTDSFRNMLERWLQC |
| | | KANRPELKNYVNSLIAVRNAFSHNQYPMYDATLFAEVKKFTLFPSVD |
| | | TKKIELNIAPQLLEIVGKAIKEIEKSENKN |
| Porphyromonas | WP_ | MNTVPASENKGQSRTVEDDPQYFGLYLNLARENLIEVESHVRIKFGK |
| gingivalis | 005873511 | KKLNEESLKQSLLCDHLLSVDRWTKVYGHSRRYLPFLHYFDPDSQIE |
| | (SEQ | KDHDSKTGVDPDSAQRLIRELYSLLDFLRNDFSHNRLDGTTFEHLEVS |
| | ID No. | PDISSFITGTYSLACGRAQSRFADFFKPDDFVLAKNRKEQLISVADGKE |
| | 113) | CLTVSGLAFFICLFLDREQASGMLSRIRGFKRTDENWARAVHETFCDL |
| | | CIRHPHDRLESSNTKEALLLDMLNELNRCPRILYDMLPEEERAQFLPA |
| | | LDENSMNNLSENSLNEESRLLWDGSSDWAEALTKRIRHQDRFPYLML |
| | | RFIEEMDLLKGIRFRVDLGEIELDSYSKKVGRNGEYDRTITDHALAFG |
| | | KLSDFQNEEEVSRMISGEASYPVRFSLFAPRYAIYDNKIGYCHTSDPVY |
| | | PKSKTGEKRALSNPQSMGFISVHNLRKLLLMELLCEGSFSRMQSDFLR |
| | | KANRILDETAEGKLQFSALFPEMRHRFIPPQNPKSKDRREKAETTLEK |
| | | YKQEIKGRKDKLNSQLLSAFDMNQRQLPSRLLDEWMNIRPASHSVKL |
| | | RTYVKQLNEDCRLRLRKFRKDGDGKARAIPLVGEMATFLSQDIVRMII |
| | | SEETKKLITSAYYNEMQRSLAQYAGEENRRQFRAIVAELHLLDPSSGH |
| | | PFLSATMETAHRYTEDFYKCYLEKKREWLAKTFYRPEQDENTKRRIS |
| | | VFFVPDGEARKLLPLLIRRRMKEQNDLQDWIRNKQAHPIDLPSHLFDS |
| | | KIMELLKVKDGKKKWNEAFKDWWSTKYPDGMQPFYGLRRELNIHG |
| | | KSVSYIPSDGKKFADCYTHLMEKTVQDKKRELRTAGKPVPPDLAADI |
| | | KRSFHRAVNEREFMLRLVQEDDRLMLMAINKMMTDREEDILPGLKNI |
| | | DSILDEENQFSLAVHAKVLEKEGEGGDNSLSLVPATIEIKSKRKDWSK |
| | | YIRYRYDRRVPGLMSHFPEHKATLDEVKTLLGEYDRCRIKIFDWAFAL |
| | | EGAIMSDRDLKPYLHESSSREGKSGEHSTLVKMLVEKKGCLTPDESQ |
| | | YLILIRNKAAHNQFPCAAEMPLIYRDVSAKVGSIEGSSAKDLPEGSSLV |
| | | DSLWKKYEMIIRKILPILDPENRFFGKLLNNMSQPINDL |
| Porphyromonas | WP_ | MTEQNEKPYNGTYYTLEDKHFWAAFFNLARHNAYITLAHIDRQLAYS |
| gingivalis | 005874195 | KADITNDEDILFFKGQWKNLDNDLERKARLRSLILKHFSFLEGAAYGK |
| | (SEQ | KLFESQSSGNKSSKKKELTKKEKEELQANALSLDNLKSILFDFLQKLK |
| | ID No. | DFRNYYSHYRHPESSELPLFDGNMLQRLYNVFDVSVQRVKRDHEHN |
| | 114) | DKVDPHRHFNHLVRKGKKDKYGNNDNPFFKHHFVDREEKVTEAGLL |
| | | FFVSLFLEKRDAIWMQKKIRGFKGGTEAYQQMTNEVFCRSRISLPKLK |
| | | LESLRTDDWMLLDMLNELVRCPKSLYDRLREEDRARFRVPVDILSDE |
| | | DDTDGTEEDPFKNTLVRHQDRFPYFALRYFDLKKVFTSLRFHIDLGTY |
| | | HFAIYKKNIGEQPEDRHLTRNLYGFGRIQDFAEEHRPEEWKRLVRDLD |
| | | YFETGDKPYITQTTPHYHIEKGKIGLRFVPEGQLLWPSPEVGATRTGRS |
| | | KYAQDKRFTAEAFLSVHELMPMMFYYFLLREKYSEEASAEKVQGRIK |
| | | RVIEDVYAVYDAFARDEINTRDELDACLADKGIRRGHLPRQMIAILSQ |
| | | EHKDMEEKVRKKLQEMIADTDHRLDMLDRQTDRKIRIGRKNAGLPK |
| | | SGVIADWLVRDMMRFQPVAKDTSGKPLNNSKANSTEYRMLQRALAL |
| | | FGGEKERLTPYFRQMNLTGGNNPHPFLHETRWESHTNILSFYRSYLKA |
| | | RKAFLQSIGRSDREENHRFLLLKEPKTDRQTLVAGWKSEFHLPRGIFT |
| | | EAVRDCLIEMGYDEVGSYKEVGFMAKAVPLYFERACKDRVQPFYDY |
| | | PFNVGNSLKPKKGRFLSKEKRAEEWESGKERFRDLEAWSHSAARRIE |
| | | DAFVGIEYASWENKKKIEQLLQDLSLWETFESKLKVKADKINIAKLKK |
| | | EILEAKEHPYHDFKSWQKFERELRLVKNQDIITWMMCRDLMEENKVE |
| | | GLDTGTLYLKDIRTDVQEQGSLNVLNHVKPMRLPVVVYRADSRGHV |
| | | HKEEAPLATVYIEERDTKLLKQGNFKSFVKDRRLNGLFSFVDTGALA |
| | | MEQYPISKLRVEYELAKYQTARVCAFEQTLELEESLLTRYPHLPDESF |
| | | REMLESWSDPLLDKWPDLQREVRLLIAVRNAFSHNQYPMYDETIFSSI |
| | | RKYDPSSLDAIEERMGLNIAHRLSEEVKLAKEMVERIIQA |
| Prevotella | WP_ | MKEEEKGKTPVVSTYNKDDKHFWAAFLNLARHNVYITVNHINKILGE |
| pallens | 006044833 | GEINRDGYENTLEKSWNEIKDINKKDRLSKLIIKHFPFLEVTTYQRNSA |
| | (SEQ | DTTKQKEEKQAEAQSLESLKKSFFVFIYKLRDLRNHYSHYKHSKSLER |
| | ID No. | PKFEEDLQEKMYNIFDASIQLVKEDYKHNTDIKTEEDFKHLDRKGQFK |
| | 115) | YSFADNEGNITESGLLFFVSLFLEKKDAIWVQKKLEGFKCSNESYQKM |
| | | TNEVFCRSRMLLPKLRLQSTQTQDWILLDMLNELIRCPKSLYERLREE |
| | | DRKKFRVPIEIADEDYDAEQEPFKNALVRHQDRFPYFALRYFDYNEIF |
| | | TNLRFQIDLGTYHFSIYKKQIGDYKESHHLTHKLYGFERIQEFTKQNRP |
| | | DEWRKFVKTFNSFETSKEPYIPETTPHYHLENQKIGIRFRNDNDKIWPS |
| | | LKTNSEKNEKSKYKLDKSFQAEAFLSVHELLPMMFYYLLLKTENTDN |
| | | DNEIETKKKENKNDKQEKHKIEEIIENKITEIYALYDAFANGKINSIDKL |
| | | EEYCKGKDIEIGHLPKQMIAILKSEHKDMATEAKRKQEEMLADVQKS |
| | | LESLDNQINEEIENVERKNSSLKSGEIASWLVNDMMRFQPVQKDNEG |
| | | NPLNNSKANSTEYQMLQRSLALYNKEEKPTRYFRQVNLIESSNPHPFL |
| | | NNTEWEKCNNILSFYRSYLEAKKNFLESLKPEDWEKNQYFLMLKEPK |
| | | TNCETLVQGWKNGFNLPRGIFTEPIRKWFMEHRKNITVAELKRVGLV |
| | | AKVIPLFFSEEYKDSVQPFYNYLFNVGNINKPDEKNFLNCEERRELLR |
| | | KKKDEFKKMTDKEKEENPSYLEFQSWNKFERELRLVRNQDIVTWLLC |
| | | MELFNKKKIKELNVEKIYLKNINTNTTKKEKNTEEKNGEEKIIKEKNNI |
| | | LNRIMPMRLPIKVYGRENFSKNKKKKIRRNTFFTVYIEEKGTKLLKQG |
| | | NFKALERDRRLGGLFSFVKTHSKAESKSNTISKSRVEYELGEYQKARI |
| | | EIIKDMLALEETLIDKYNSLDTDNFHNMLTGWLKLKDEPDKASFQND |
| | | VDLLIAVRNAFSHNQYPMRNRIAFANINPFSLSSANTSEEKGLGIANQL |
| | | KDKTHKTIEKIIEIEKPIETKE |
| Myroides | WP_ | MKDILTTDTTEKQNRFYSHKIADKYFFGGYFNLASNNIYEVFEEVNKR |
| odoratimimus | 006261414 | NTFGKLAKRDNGNLKNYIIHVFKDELSISDFEKRVAIFASYFPILETVD |
| | (SEQ | KKSIKERNRTIDLTLSQRIRQFREMLISLVTAVDQLRNFYTHYHHSEIVI |
| | ID No. | ENKVLDFLNSSLVSTALHVKDKYLKTDKTKEFLKETIAAELDILIEAY |
| | 116) | KKKQIEKKNTRFKANKREDILNAIYNEAFWSFINDKDKDKETVVAKG |
| | | ADAYFEKNEIHKSNDPDFALNISEKGIVYLLSFFLTNKEMDSLKANLTG |
| | | FKGKVDRESGNSIKYMATQRIYSFHTYRGLKQKIRTSEEGVKETLLMQ |
| | | MIDELSKVPNVVYQHLSTTQQNSFIEDWNEYYKDYEDDVETDDLSRV |
| | | IHPVIRKRYEDRFNYFAIRFLDEFFDFPTLRFQVHLGDYVHDRRTKQL |
| | | GKVESDRIIKEKVTVFARLKDINSAKANYFHSLEEQDKEELDNKWTLF |
| | | PNPSYDFPKEHTLQHQGEQKNAGKIGIYVKLRDTQYKEKAALEEARK |
| | | SLNPKERSATKASKYDIITQIIEANDNVKSEKPLVFTGQPIAYLSMNDIH |
| | | SMLFSLLTDNAELKKTPEEVEAKLIDQIGKQINEILSKDTDTKILKKYK |
| | | DNDLKETDTDKITRDLARDKEEIEKLILEQKQRADDYNYTSSTKFNID |
| | | KSRKRKHLLFNAEKGKIGVWLANDIKRFMTEEFKSKWKGYQHTELQ |
| | | KLFAYYDTSKSDLDLILSDMVMVKDYPIELIALVKKSRTLVDFLNKYL |
| | | EARLGYMENVITRVKNSIGTPQFKTVRKECFTFLKKSNYTVVSLDKQ |
| | | VERILSMPLFIERGFMDDKPTMLEGKSYQQHKEKFADWFVHYKENSN |
| | | YQNFYDTEVYEITTEDKREKAKVTKKIKQQQKNDVFTLMMVNYMLE |
| | | EVLKLSSNDRLSLNELYQTKEERIVNKQVAKDTQERNKNYIWNKVVD |
| | | LQLCEGLVRIDKVKLKDIGNFRKYENDSRVKEFLTYQSDIVWSAYLSN |
| | | EVDSNKLYVIERQLDNYESIRSKELLKEVQEIECSVYNQVANKESLKQ |
| | | SGNENFKQYVLQGLVPIGMDVREMLILSTDVKFIKEEIIQLGQAGEVE |
| | | QDLYSLIYIRNKFAHNQLPIKEFFDFCENNYRSISDNEYYAEYYMEIFR |
| | | SIKEKYTS |
| Myroides | WP_ | MKDILTTDTTEKQNRFYSHKIADKYFFGGYFNLASNNIYEVFEEVNKR |
| odoratimimus | 006265509 | NTFGKLAKRDNGNLKNYIIHVFKDELSISDFEKRVAIFASYFPILETVD |
| | (SEQ | KKSIKERNRTIDLTLSQRIRQFREMLISLVTAVDQLRNFYTHYHHSEIVI |
| | ID No. | ENKVLDFLNSSLVSTALHVKDKYLKTDKTKEFLKETIAAELDILIEAY |
| | 117) | KKKQIEKKNTRFKANKREDILNAIYNEAFWSFINDKDKDKETVVAKG |
| | | ADAYFEKNEIHKSNDPDFALNISEKGIVYLLSFFLTNKEMDSLKANLTG |
| | | FKGKVDRESGNSIKYMATQRIYSFHTYRGLKQKIRTSEEGVKETLLMQ |
| | | MIDELSKVPNVVYQHLSTTQQNSFIEDWNEYYKDYEDDVETDDLSRV |
| | | IHPVIRKRYEDRFNYFAIRFLDEFFDFPTLRFQVHLGDYVHDRRTKQL |
| | | GKVESDRIIKEKVTVFARLKDINSAKASYFHSLEEQDKEELDNKWTLF |
| | | PNPSYDFPKEHTLQHQGEQKNAGKIGIYVKLRDTQYKEKAALEEARK |
| | | SLNPKERSATKASKYDIITQIIEANDNVKSEKPLVFTGQPIAYLSMNDIH |
| | | SMLFSLLTDNAELKKTPEEVEAKLIDQIGKQINEILSKDTDTKILKKYK |
| | | DNDLKETDTDKITRDLARDKEEIEKLILEQKQRADDYNYTSSTKFNID |
| | | KSRKRKHLLFNAEKGKIGVWLANDIKRFMFKESKSKWKGYQHTELQ |
| | | KLFAYFDTSKSDLELILSDMVMVKDYPIELIDLVRKSRTLVDFLNKYL |
| | | EARLGYIENVITRVKNSIGTPQFKTVRKECFAFLKESNYTVASLDKQIE |
| | | RILSMPLFIERGFMDSKPTMLEGKSYQQHKEDFADWFVHYKENSNYQ |
| | | NFYDTEVYEIITEDKREQAKVTKKIKQQQKNDVFTLMMVNYMLEEV |
| | | LKLPSNDRLSLNELYQTKEERIVNKQVAKDTQERNKNYIWNKVVDLQ |
| | | LCEGLVRIDKVKLKDIGNFRKYENDSRVKEFLTYQSDIVWSGYLSNEV |
| | | DSNKLYVIERQLDNYESIRSKELLKEVQEIECIVYNQVANKESLKQSG |
| | | NENFKQYVLQGLLPRGTDVREMLILSTDVKFKKEEIMQLGQVREVEQ |
| | | DLYSLIYIRNKFAHNQLPIKEFFDFCENNYRPISDNEYYAEYYMEIFRSI |
| | | KEKYAS |
| Prevotella | WP_ | MQKQDKLFVDRKKNAIFAFPKYITIMENQEKPEPIYYELTDKHFWAAF |
| sp. MSX73 | 007412163 | LNLARHNVYTTINHINRRLEIAELKDDGYMMGIKGSWNEQAKKLDK |
| | (SEQ | KVRLRDLIMKHFPFLEAAAYEITNSKSPNNKEQREKEQSEALSLNNLK |
| | ID No. | NVLFIFLEKLQVLRNYYSHYKYSEESPKPIFETSLLKNMYKVFDANVR |
| | 118) | LVKRDYMEIHENIDMQRDFTHLNRKKQVGRTKNIIDSPNFHYHFADKE |
| | | GNMTIAGLLFFVSLFLDKKDAIWMQKKLKGFKDGRNLREQMTNEVF |
| | | CRSRISLPKLKLENVQTKDWMQLDMLNELVRCPKSLYERLREKDRES |
| | | FKVPFDIFSDDYDAEEEPFKNTLVRHQDRFPYFVLRYFDLNEIFEQLRF |
| | | QIDLGTYHFSIYNKRIGDEDEVRHLTHHLYGFARIQDFAPQNQPEEWR |
| | | KLVKDLDHFETSQEPYISKTAPHYHLENEKIGIKFCSTHNNLFPSLKRE |
| | | KTCNGRSKFNLGTQFTAEAFLSVHELLPMMFYYLLLTKDYSRKESAD |
| | | KVEGIIRKEISNIYAIYDAFANNEINSIADLTCRLQKTNILQGHLPKQMI |
| | | SILEGRQKDMEKEAERKIGEMIDDTQRRLDLLCKQTNQKIRIGKRNAG |
| | | LLKSGKIADWLVSDMMRFQPVQKDTNNAPINNSKANSTEYRMLQHA |
| | | LALFGSESSRLKAYFRQMNLVGNANPHPFLAETQWEHQTNILSFYRN |
| | | YLEARKKYLKGLKPQNWKQYQHFLILKVQKTNRNTLVTGWKNSFNL |
| | | PRGIFTQPIREWFEKHNNSKRIYDQILSFDRVGFVAKAIPLYFAEEYKD |
| | | NVQPFYDYPFNIGNKLKPQKGQFLDKKERVELWQKNKELFKNYPSEK |
| | | NKTDLAYLDFLSWKKFERELRLIKNQDIVTWLMFKELFKTTTVEGLKI |
| | | GEIHLRDIDTNTANEESNNILNRIMPMKLPVKTYETDNKGNILKERPLA |
| | | TFYIEETETKVLKQGNFKVLAKDRRLNGLLSFAETTDIDLEKNPITKLS |
| | | VDYELIKYQTTRISIFEMTLGLEKKLIDKYSTLPTDSFRNMLERWLQCK |
| | | ANRPELKNYVNSLIAVRNAFSHNQYPMYDATLFAEVKKFTLFPSVDT |
| | | KKIELNIAPQLLEIVGKAIKEIEKSENKN |
| Porphyromonas | WP_ | MTEQNERPYNGTYYTLEDKHFWAAFFNLARHNAYITLAHIDRQLAYS |
| gingivalis | 012458414 | KADITNDEDILFFKGQWKNLDNDLERKARLRSLILKHFSFLEGAAYGK |
| | (SEQ | KLFESQSSGNKSSKKKELTKKEKEELQANALSLDNLKSILFDFLQKLK |
| | ID No. | DFRNYYSHYRHPESSELPLFDGNMLQRLYNVFDVSVQRVKRDHEHN |
| | 119) | DKVDPHRHFNHLVRKGKKDRYGNNDNPFFKHHFVDREEKVTEAGLL |
| | | FFVSLFLEKRDAIWMQKKIRGFKGGTETYQQMTNEVFCRSRISLPKLK |
| | | LESLRTDDWMLLDMLNELVRCPKSLYDRLREEDRARFRVPVDILSDE |
| | | DDTDGTEEDPFKNTLVRHQDRFPYFALRYFDLKKVFTSLRFHIDLGTY |
| | | HFAIYKKNIGEQPEDRHLTRNLYGFGRIQDFAEEHRPEEWKRLVRDLD |
| | | YFETGDKPYITQTTPHYHIEKGKIGLRFVPEGQHLWPSPEVGATRTGR |
| | | SKYAQDKRLTAEAFLSVHELMPMMFYYFLLREKYSDEASAERVQGRI |
| | | KRVIEDVYAVYDAFARGEINTRDELDACLADKGIRRGHLPRQMIGILS |
| | | QEHKDMEEKVRKKLQEMIVDTDHRLDMLDRQTDRKIRIGRKNAGLP |
| | | KSGVIADWLVRDMMRFQPVAKDTSGKPLNNSKANSTEYRMLQRALA |
| | | LFGGEKERLTPYFRQMNLTGGNNPHPFLHETRWESHTNILSFYRSYLK |
| | | ARKAFLQSIGRSDRVENHRFLLLKEPKTDRQTLVAGWKGEFHLPRGIF |
| | | TEAVRDCLIEMGLDEVGSYKEVGFMAKAVPLYFERACKDRVQPFYD |
| | | YPFNVGNSLKPKKGRFLSKEKRAEEWESGKERFRLAKLKKEILEAKE |
| | | HPYLDFKSWQKFERELRLVKNQDIITWMICRDLMEENKVEGLDTGTL |
| | | YLKDIRTDVQEQGNLNVLNRVKPMRLPVVVYRADSRGHVHKEQAPL |
| | | ATVYIEERDTKLLKQGNFKSFVKDRRLNGLFSFVDTGALAMEQYPISK |
| | | LRVEYELAKYQTARVCAFEQTLELEESLLTRYPHLPDKNFRKMLESW |
| | | SDPLLDKWPDLHGNVRLLIAVRNAFSHNQYPMYDEAVFSSIRKYDPS |
| | | SPDAIEERMGLNIAHRLSEEVKQAKEMAERIIQA |
| Paludibacter | WP_ | MKTSANNIYFNGINSFKKIFDSKGAIAPIAEKSCRNFDIKAQNDVNKEQ |
| propionicigenes | 013446107 | RIHYFAVGHTFKQLDTENLFEYVLDENLRAKRPTRFISLQQFDKEFIEN |
| | (SEQ | IKRLISDIRNINSHYIHRFDPLKIDAVPTNIIDFLKESFELAVIQTYLKEKG |
| | ID No. | INYLQFSENPHADQKLVAFLHDKFLPLDEKKTSMLQNETPQLKEYKE |
| | 120) | YRKYFKTLSKQAAIDQLLFAEKETDYIWNLFDSHPVLTISAGKYLSFY |
| | | SCLFLLSMFLYKSEANQLISKIKGFKKNTTEEEKSKREIFTFFSKRFNSM |
| | | DIDSEENQLVKFRDLILYLNHYPVAWNKDLELDSSNPAMTDKLKSKII |
| | | ELEINRSFPLYEGNERFATFAKYQIWGKKHLGKSIEKEYINASFTDEEIT |
| | | AYTYETDTCPELKDAHKKLADLKAAKGLFGKRKEKNESDIKKTETSI |
| | | RELQHEPNPIKDKLIQRIEKNLLTVSYGRNQDRFMDFSARFLAEINYFG |
| | | QDASFKMYHFYATDEQNSELEKYELPKDKKKYDSLKFHQGKLVHFIS |
| | | YKEHLKRYESWDDAFVIENNAIQLKLSFDGVENTVTIQRALLIYLLED |
| | | ALRNIQNNTAENAGKQLLQEYYSHNKADLSAFKQILTQQDSIEPQQKT |
| | | EFKKLLPRRLLNNYSPAINHLQTPHSSLPLILEKALLAEKRYCSLVVKA |
| | | KAEGNYDDFIKRNKGKQFKLQFIRKAWNLMYFRNSYLQNVQAAGEIH |
| | | KSFHIERDEFNDFSRYMFAFEELSQYKYYLNEMFEKKGFFENNEFKIL |
| | | FQSGTSLENLYEKTKQKFEIWLASNTAKTNKPDNYHLNNYEQQFSNQ |
| | | LFFINLSHFINYLKSTGKLQTDANGQIIYEALNNVQYLIPEYYYTDKPE |
| | | RSESKSGNKLYNKLKATKLEDALLYEMAMCYLKADKQIADKAKHPI |
| | | TKLLTSDVEFNITNKEGIQLYHLLVPFKKIDAFIGLKMHKEQQDKKHP |
| | | TSFLANIVNYLELVKNDKDIRKTYEAFSTNPVKRTLTYDDLAKIDGHL |
| | | ISKSIKFTNVTLELERYFIFKESLIVKKGNNIDFKYIKGLRNYYNNEKKK |
| | | NEGIRNKAFHFGIPDSKSYDQLIRDAEVMFIANEVKPTHATKYTDLNK |
| | | QLHTVCDKLMETVHNDYFSKEGDGKKKREAAGQKYFENIISAK |
| Porphyromonas | WP_ | MTEQNEKPYNGTYYTLEDKHFWAAFFNLARHNAYITLAHIDRQLAYS |
| gingivalis | 013816155 | KADITNDEDILFFKGQWKNLDNDLERKARLRSLILKHFSFLEGAAYGK |
| | (SEQ | KLFESQSSGNKSSKNKELTKKEKEELQANALSLDNLKSILFDFLQKLK |
| | ID No. | DFRNYYSHYRHPESSELPLFDGNMLQRLYNVFDVSVQRVKRDHEHN |
| | 121) | DKVDPHRHFNHLVRKGKKDRYGNNDNPFFKHHFVDREGTVTEAGLL |
| | | FFVSLFLEKRDAIWMQKKIRGFKGGTETYQQMTNEVFCRSRISLPKLK |
| | | LESLRTDDWMLLDMLNELVRCPKSLYDRLREEDRARFRVPVDILSDE |
| | | EDTDGAEEDPFKNTLVRHQDRFPYFALRYFDLKKVFTSLRFQIDLGTY |
| | | HFAIYKKNIGEQPEDRHLTRNLYGFGRIQDFAEEHRPEEWKRLVRDLD |
| | | YFETGDKPYITQTTPHYHIEKGKIGLRFVPEGQHLWPSPEVGATRTGR |
| | | SKYAQDKRFTAEAFLSAHELMPMMFYYFLLREKYSEEASAERVQGRI |
| | | KRVIEDVYAVYDAFARDEINTRDELDACLADKGIRRGHLPRQMIGILS |
| | | QEHKDMEEKIRKKLQEMMADTDHRLDMLDRQTDRKIRIGRKNAGLP |
| | | KSGVIADWLVRDMMRFQPVAKDTSGKPLNNSKANSTEYRMLQRALA |
| | | LFGGEKERLTPYFRQMNLTGGNNPHPFLHETRWESHTNILSFYRSYLK |
| | | ARKAFLQSIGRSDRVENHRFLLLKEPKTDRQTLVAGWKGEFHLPRGIF |
| | | TEAVRDCLIEMGLDEVGSYKEVGFMAKAVPLYFERACKDWVQPFYN |
| | | YPFNVGNSLKPKKGRFLSKEKRAEEWESGKERFRLAKLKKEILEAKE |
| | | HPYLDFKSWQKFERELRLVKNQDIITWMICGDLMEENKVEGLDTGTL |
| | | YLKDIRTDVQEQGSLNVLNRVKPMRLPVVVYRADSRGHVHKEQAPL |
| | | ATVYIEERDTKLLKQGNFKSFVKDRRLNGLFSFVDTGALAMEQYPISK |
| | | LRVEYELAKYQTARVCAFEQTLELEESLLTRCPHLPDKNFRKMLESW |
| | | SDPLLDKWPDLHRKVRLLIAVRNAFSHNQYPMYDEAVFSSIRKYDPSF |
| | | PDAIEERMGLNIAHRLSEEVKQAKETVERIIQA |
| Flavo- | WP_ | MSSKNESYNKQKTFNHYKQEDKYFFGGFLNNADDNLRQVGKEFKTR |
| bacterium | 014165541 | INFNHNNNELASVFKDYFNKEKSVAKREHALNLLSNYFPVLERIQKHT |
| columnare | (SEQ | NHNFEQTREIFELLLDTIKKLRDYYTHHYHKPITINPKIYDFLDDTLLD |
| | ID No. | VLITIKKKKVKNDTSRELLKEKLRPELTQLKNQKREELIKKGKKLLEE |
| | 122) | NLENAVFNHCLRPFLEENKTDDKQNKTVSLRKYRKSKPNEETSITLTQ |
| | | SGLVFLMSFFLHRKEFQVFTSGLEGFKAKVNTIKEEEISLNKNNIVYMI |
| | | THWSYSYYNFKGLKHRIKTDQGVSTLEQNNTTHSLTNTNTKEALLTQ |
| | | IVDYLSKVPNEIYETLSEKQQKEFEEDINEYMRENPENEDSTFSSIVSH |
| | | KVIRKRYENKFNYFAMRFLDEYAELPTLRFMVNFGDYIKDRQKKILES |
| | | IQFDSERIIKKEIHLFEKLSLVTEYKKNVYLKETSNIDLSRFPLFPNPSYV |
| | | MANNNIPFYIDSRSNNLDEYLNQKKKAQSQNKKRNLTFEKYNKEQSK |
| | | DAIIAMLQKEIGVKDLQQRSTIGLLSCNELPSMLYEVIVKDIKGAELEN |
| | | KIAQKIREQYQSIRDFTLDSPQKDNIPTTLIKTINTDSSVTFENQPIDIPRL |
| | | KNAIQKELTLTQEKLLNVKEHEIEVDNYNRNKNTYKFKNQPKNKVD |
| | | DKKLQRKYVFYRNEIRQEANWLASDLIHFMKNKSLWKGYMHNELQS |
| | | FLAFFEDKKNDCIALLETVFNLKEDCILTKGLKNLFLKHGNFIDFYKEY |
| | | LKLKEDFLNTESTFLENGLIGLPPKILKKELSKRFKYIFIVFQKRQFIIKE |
| | | LEEKKNNLYADAINLSRGIFDEKPTMIPFKKPNPDEFASWFVASYQYN |
| | | NYQSFYELTPDIVERDKKKKYKNLRAINKVKIQDYYLKLMVDTLYQD |
| | | LFNQPLDKSLSDFYVSKAEREKIKADAKAYQKRNDSSLWNKVIHLSL |
| | | QNNRITANPKLKDIGKYKRALQDEKIATLLTYDDRTWTYALQKPEKE |
| | | NENDYKELHYTALNMELQEYEKVRSKELLKQVQELEKQILEEYTDFL |
| | | STQIHPADFEREGNPNFKKYLAHSILENEDDLDKLPEKVEAMRELDET |
| | | ITNPIIKKAIVLIIIRNKMAHNQYPPKFIYDLANRFVPKKEEEYFATYFN |
| | | RVFETITKELWENKEKKDKTQV |
| Psychroflexus | WP_ | MESIIGLGLSFNPYKTADKHYFGSFLNLVENNLNAVFAEFKERISYKA |
| torquis | 015024765 | KDENISSLIEKHFIDNMSIVDYEKKISILNGYLPIIDFLDDELENNLNTRV |
| | (SEQ | KNFKKNFIILAEAIEKLRDYYTHFYHDPITFEDNKEPLLELLDEVLLKTI |
| | ID No. | LDVKKKYLKTDKTKEILKDSLREEMDLLVIRKTDELREKKKTNPKIQH |
| | 123) | TDSSQIKNSIFNDAFQGLLYEDKGNNKKTQVSHRAKTRLNPKDIHKQE |
| | | ERDFEIPLSTSGLVFLMSLFLSKKEIEDFKSNIKGFKGKVVKDENHNSL |
| | | KYMATHRVYSILAFKGLKYRIKTDTFSKETLMMQMIDELSKVPDCVY |
| | | QNLSETKQKDFIEDWNEYFKDNEENTENLENSRVVHPVIRKRYEDKF |
| | | NYFAIRFLDEFANFKTLKFQVFMGYYIHDQRTKTIGTTNITTERTVKEK |
| | | INVFGKLSKMDNLKKHFFSQLSDDENTDWEFFPNPSYNFLTQADNSP |
| | | ANNIPIYLELKNQQIIKEKDAIKAEVNQTQNRNPNKPSKRDLLNKILKT |
| | | YEDFHQGDPTAILSLNEIPALLHLFLVKPNNKTGQQIENIIRIKIEKQFK |
| | | AINHPSKNNKGIPKSLFADTNVRVNAIKLKKDLEAELDMLNKKHIAFK |
| | | ENQKASSNYDKLLKEHQFTPKNKRPELRKYVFYKSEKGEEATWLAN |
| | | DIKRFMPKDFKTKWKGCQHSELQRKLAFYDRHTKQDIKELLSGCEFD |
| | | HSLLDINAYFQKDNFEDFFSKYLENRIETLEGVLKKLHDFKNEPTPLK |
| | | GVFKNCFKFLKRQNYVTESPEIIKKRILAKPTFLPRGVFDERPTMKKG |
| | | KNPLKDKNEFAEWFVEYLENKDYQKFYNAEEYRMRDADFKKNAVIK |
| | | KQKLKDFYTLQMVNYLLKEVFGKDEMNLQLSELFQTRQERLKLQGI |
| | | AKKQMNKETGDSSENTRNQTYIWNKDVPVSFFNGKVTIDKVKLKNIG |
| | | KYKRYERDERVKTFIGYEVDEKWMMYLPHNWKDRYSVKPINVIDLQ |
| | | IQEYEEIRSHELLKEIQNLEQYIYDHTTDKNILLQDGNPNFKMYVLNGL |
| | | LIGIKQVNIPDFIVLKQNTNFDKIDFTGIASCSELEKKTIILIAIRNKFAHN |
| | | QLPNKMIYDLANEFLKIEKNETYANYYLKVLKKMISDLA |
| Riemerella | WP_ | MFFSFHNAQRVIFKHLYKAFDASLRMVKEDYKAHFTVNLTRDFAHL |
| anatipestifer | 015345620 | NRKGKNKQDNPDFNRYRFEKDGFFTESGLLFFTNLFLDKRDAYWML |
| | (SEQ | KKVSGFKASHKQREKMTTEVFCRSRILLPKLRLESRYDHNQMLLDML |
| | ID No. | SELSRCPKLLYEKLSEENKKHFQVEADGFLDEIEEEQNPFKDTLIRHQD |
| | 124) | RFPYFALRYLDLNESFKSIRFQVDLGTYHYCIYDKKIGDEQEKRHLTR |
| | | TLLSFGRLQDFTEINRPQEWKALTKDLDYKETSNQPFISKTTPHYHITD |
| | | NKIGFRLGTSKELYPSLEIKDGANRIAKYPYNSGFVAHAFISVHELLPL |
| | | MFYQHLTGKSEDLLKETVRHIQRIYKDFEEERINTIEDLEKANQGRLPL |
| | | GAFPKQMLGLLQNKQPDLSEKAKIKIEKLIAETKLLSHRLNTKLKSSP |
| | | KLGKRREKLIKTGVLADWLVKDFMRFQPVAYDAQNQPIKSSKANSTE |
| | | FWFIRRALALYGGEKNRLEGYFKQTNLIGNTNPHPFLNKFNWKACRN |
| | | LVDFYQQYLEQREKFLEAIKHQPWEPYQYCLLLKVPKENRKNLVKG |
| | | WEQGGISLPRGLFTEAIRETLSKDLTLSKPIRKEIKKHGRVGFISRAITL |
| | | YFKEKYQDKHQSFYNLSYKLEAKAPLLKKEEHYEYWQQNKPQSPTE |
| | | SQRLELHTSDRWKDYLLYKRWQHLEKKLRLYRNQDIMLWLMTLELT |
| | | KNHFKELNLNYHQLKLENLAVNVQEADAKLNPLNQTLPMVLPVKVY |
| | | PTTAFGEVQYHETPIRTVYIREEQTKALKMGNFKALVKDRRLNGLFSF |
| | | IKEENDTQKHPISQLRLRRELEIYQSLRVDAFKETLSLEEKLLNKHASL |
| | | SSLENEFRTLLEEWKKKYAASSMVTDKHIAFIASVRNAFCHNQYPFY |
| | | KETLHAPILLFTVAQPTTEEKDGLGIAEALLKVLREYCEIVKSQI |
| Prevotella | WP_ | MENDKRLEESACYTLNDKHFWAAFLNLARHNVYITVNHINKTLELK |
| pleuritidis | 021584635 | NKKNQEIIIDNDQDILAIKTHWAKVNGDLNKTDRLRELMIKHFPFLEA |
| | (SEQ | AIYSNNKEDKEEVKEEKQAKAQSFKSLKDCLFLFLEKLQEARNYYSH |
| | ID No. | YKYSESSKEPEFEEGLLEKMYNTFDASIRLVKEDYQYNKDIDPEKDFK |
| | 125) | HLERKEDFNYLFTDKDNKGKITKNGLLFFVSLFLEKKDAIWMQQKFR |
| | | GFKDNRGNKEKMTHEVFCRSRMLLPKIRLESTQTQDWILLDMLNELI |
| | | RCPKSLYERLQGAYREKFKVPFDSIDEDYDAEQEPFRNTLVRHQDRFP |
| | | YFALRYFDYNEIFKNLRFQIDLGTYHFSIYKKLIGGKKEDRHLTHKLY |
| | | GFERIQEFTKQNRPDKWQAIIKDLDTYETSNERYISETTPHYHLENQKI |
| | | GIRFRNDNNDIWPSLKTNGEKNEKSKYNLDKPYQAEAFLSVHELLPM |
| | | MFYYLLLKMENTDNDKEDNEVGTKKKGNKNNKQEKHKIEEIIENKIK |
| | | DIYALYDAFTNGEINSIDELAEQREGKDIEIGHLPKQLIVILKNKSKDM |
| | | AEKANRKQKEMIKDTKKRLATLDKQVKGEIEDGGRNIRLLKSGEIAR |
| | | WLVNDMMRFQPVQKDNEGKPLNNSKANSTEYQMLQRSLALYNKEE |
| | | KPTRYFRQVNLIKSSNPHPFLEDTKWEECYNILSFYRNYLKAKIKFLN |
| | | KLKPEDWKKNQYFLMLKEPKTNRKTLVQGWKNGFNLPRGIFTEPIKE |
| | | WFKRHQNDSEEYKKVEALDRVGLVAKVIPLFFKEEYFKEDAQKEINN |
| | | CVQPFYSFPYNVGNIHKPEEKNFLHCEERRKLWDKKKDKFKGYKAK |
| | | EKSKKMTDKEKEEHRSYLEFQSWNKFERELRLVRNQDILTWLLCTKL |
| | | IDKLKIDELNIEELQKLRLKDIDTDTAKKEKNNILNRVMPMRLPVTVY |
| | | EIDKSFNIVKDKPLHTVYIEETGTKLLKQGNFKALVKDRRLNGLFSFV |
| | | KTSSEAESKSKPISKLRVEYELGAYQKARIDIIKDMLALEKTLIDNDEN |
| | | LPTNKFSDMLKSWLKGKGEANKARLQNDVGLLVAVRNAFSHNQYP |
| | | MYNSEVFKGMKLLSLSSDIPEKEGLGIAKQLKDKIKETIERIIEIEKEIRN |
| Porphyromonas | WP_ | MNTVPASENKGQSRTVEDDPQYFGLYLNLARENLIEVESHVRIKFGK |
| gingivalis | 021663197 | KKLNEESLKQSLLCDHLLSVDRWTKVYGHSRRYLPFLHYFDPDSQIE |
| | (SEQ | KDHDSKTGVDPDSAQRLIRELYSLLDFLRNDFSHNRLDGTTFEHLEVS |
| | ID No. | PDISSFITGTYSLACGRAQSRFADFFKPDDFVLAKNRKEQLISVADGKE |
| | 126) | CLTVSGLAFFICLFLDREQASGMLSRIRGFKRTDENWARAVHETFCDL |
| | | CIRHPHDRLESSNTKEALLLDMLNELNRCPRILYDMLPEEERAQFLPA |
| | | LDENSMNNLSENSLNEESRLLWDGSSDWAEALTKRIRHQDRFPYLML |
| | | RFIEEMDLLKGIRFRVDLGEIELDSYSKKVGRNGEYDRTITDHALAFG |
| | | KLSDFQNEEEVSRMISGEASYPVRFSLFAPRYAIYDNKIGYCHTSDPVY |
| | | PKSKTGEKRALSNPRSMGFISVHDLRKLLLMELLCEGSFSRMQSDFLR |
| | | KANRILDETAEGKLQFSALFPEMRHRFIPPQNPKSKDRREKAETTLEK |
| | | YKQEIKGRKDKLNSQLLSAFDMDQRQLPSRLLDEWMNIRPASHSVKL |
| | | RTYVKQLNEDCRLRLQKFRKDGDGKARAIPLVGEMATFLSQDIVRMII |
| | | SEETKKLITSAYYNEMQRSLAQYAGEENRHQFRAIVAELRLLDPSSGH |
| | | PFLSATMETAHRYTEDFYKCYLEKKREWLAKTFYRPEQDENTKRRIS |
| | | VFFVPDGEARKLLPLLIRRRMKEQNDLQDWIRNKQAHPIDLPSHLFDS |
| | | KIMELLKVKDGKKKWNEAFKDWWSTKYPDGMQPFYGLRRELNIHG |
| | | KSVSYIPSDGKKFADCYTHLMEKTVQDKKRELRTAGKPVPPDLAADI |
| | | KRSFHRAVNEREFMLRLVQEDDRLMLMAINKMMTDREEDILPGLKNI |
| | | DSILDEENQFSLAVHAKVLEKEGEGGDNSLSLVPATIEIKSKRKDWSK |
| | | YIRYRYDRRVPGLMSHFPEHKATLDEVKTLLGEYDRCRIKIFDWAFAL |
| | | EGAIMSDRDLKPYLHESSSREGKSGEHSTLVKMLVEKKGCLTPDESQ |
| | | YLILIRNKAAHNQFPCAAEMPLIYRDVSAKVGSIEGSSAKDLPEGSSLV |
| | | DSLWKKYEMIIRKILPILDPENRFFGKLLNNMSQPINDL |
| Porphyromonas | WP_ | MNTVPASENKGQSRTVEDDPQYFGLYLNLARENLIEVESHVRIKFGK |
| gingivalis | 021665475 | KKLNEESLKQSLLCDHLLSVDRWTKVYGHSRRYLPFLHYFDPDSQIE |
| | (SEQ | KDHDSKTGVDPDSAQRLIRELYSLLDFLRNDFSHNRLDGTTFEHLEVS |
| | ID No. | PDISSFITGTYSLACGRAQSRFADFFKPDDFVLAKNRKEQLISVADGKE |
| | 127) | CLTVSGLAFFICLFLDREQASGMLSRIRGFKRTNENWARAVHETFCDL |
| | | CIRHPHDRLESSNTKEALLLDMLNELNRCPRILYDMLPEEERAQFLPA |
| | | LDENSMNNLSENSLNEESRLLWDGSSDWAEALTKRIRHQDRFPYLML |
| | | RFIEEMDLLKGIRFRVDLGEIELDSYSKKVGRNGEYDRTITDHALAFG |
| | | KLSDFQNEEEVSRMISGEASYPVRFSLFAPRYAIYDNKIGYCHTSDPVY |
| | | PKSKTGEKRALSNPQSMGFISVHDLRKLLLMELLCEGSFSRMQSGFLR |
| | | KANRILDETAEGKLQFSALFPEMRHRFIPPQNPKSKDRREKAETTLEK |
| | | YKQEIKGRKDKLNSQLLSAFDMNQRQLPSRLLDEWMNIRPASHSVKL |
| | | RTYVKQLNEDCRLRLRKFRKDGDGKARAIPLVGEMATFLSQDIVRMII |
| | | SEETKKLITSAYYNEMQRSLAQYAGEENRRQFRAIVAELHLLDPSSGH |
| | | PFLSATMETAHRYTEDFYKCYLEKKREWLAKTFYRPEQDENTKRRIS |
| | | VFFVPDGEARKLLPLLIRRRMKEQNDLQDWIRNKQAHPIDLPSHLFDS |
| | | KIMELLKVKDGKKKWNEAFKDWWSTKYPDGMQPFYGLRRELNIHG |
| | | KSVSYIPSDGKKFADCYTHLMEKTVQDKKRELRTAGKPVPPDLAADI |
| | | KRSFHRAVNEREFMLRLVQEDDRLMLMAINKMMTDREEDILPGLKNI |
| | | DSILDKENQFSLAVHAKVLEKEGEGGDNSLSLVPATIEIKSKRKDWSK |
| | | YIRYRYDRRVPGLMSHFPEHKATLDEVKTLLGEYDRCRIKIFDWAFAL |
| | | EGAIMSDRDLKPYLHESSSREGKSGEHSTLVKMLVEKKGCLTPDESQ |
| | | YLILIRNKAAHNQFPCAAEMPLIYRDVSAKVGSIEGSSAKDLPEGSSLV |
| | | DSLWKKYEMIIRKILPILDHENRFFGKLLNNMSQPINDL |
| Porphyromonas | WP_ | MNTVPASENKGQSRTVEDDPQYFGLYLNLARENLIEVESHVRIKFGK |
| gingivalis | 021677657 | KKLNEESLKQSLLCDHLLSVDRWTKVYGHSRRYLPFLHYFDPDSQIE |
| | (SEQ | KDHDSKTGVDPDSAQRLIRELYSLLDFLRNDFSHNRLDGTTFEHLEVS |
| | ID No. | PDISSFITGTYSLACGRAQSRFADFFKPDDFVLAKNRKEQLISVADGKE |
| | 128) | CLTVSGLAFFICLFLDREQASGMLSRIRGFKRTDENWARAVHETFCDL |
| | | CIRHPHDRLESSNTKEALLLDMLNELNRCPRILYDMLPEEERAQFLPA |
| | | LDENSMNNLSENSLNEESRLLWDGSSDWAEALTKRIRHQDRFPYLML |
| | | RFIEEMDLLKGIRFRVDLGEIELDSYSKKVGRNGEYDRTITDHALAFG |
| | | KLSDFQNEEEVSRMISGEASYPVRFSLFAPRYAIYDNKIGYCHTSDPVY |
| | | PKSKTGEKRALSNPQSMGFISVHDLRKLLLMELLCEGSFSRMQSGFLR |
| | | KANRILDETAEGKLQFSALFPEMRHRFIPPQNPKSKDRREKAETTLEK |
| | | YKQEIKGRKDKLNSQLLSAFDMNQRQLPSRLLDEWMNIRPASHSVKL |
| | | RTYVKQLNEDCRLRLRKFRKDGDGKARAIPLVGEMATFLSQDIVRMII |
| | | SEETKKLITSAYYNEMQRSLAQYAGEENRRQFRAIVAELHLLDPSSGH |
| | | PFLSATMETAHRYTEDFYKCYLEKKREWLAKTFYRPEQDENTKRRIS |
| | | VFFVPDGEARKLLPLLIRRRMKEQNDLQDWIRNKQAHPIDLPSHLFDS |
| | | KIMELLKVKDGKKKWNEAFKDWWSTKYPDGMQPFYGLRRELNIHG |
| | | KSVSYIPSDGKKFADCYTHLMEKTVQDKKRELRTAGKPVPPDLAADI |
| | | KRSFHRAVNEREFMLRLVQEDDRLMLMAINKMMTDREEDILPGLKNI |
| | | DSILDEENQFSLAVHAKVLEKEGEGGDNSLSLVPATIEIKSKRKDWSK |
| | | YIRYRYDRRVPGLMSHFPEHKATLDEVKTLLGEYDRCRIKIFDWAFAL |
| | | EGAIMSDRDLKPYLHESSSREGKSGEHSTLVKMLVEKKGCLTPDESQ |
| | | YLILIRNKAAHNQFPCAAEMPLIYRDVSAKVGSIEGSSAKDLPEGSSLV |
| | | DSLWKKYEMIIRKILPILDHENRFFGKLLNNMSQPINDL |
| Porphyromonas | WP_ | MNTVPASENKGQSRTVEDDPQYFGLYLNLARENLIEVESHVRIKFGK |
| gingivalis | 021680012 | KKLNEESLKQSLLCDHLLSVDRWTKVYGHSRRYLPFLHYFDPDSQIE |
| | (SEQ | KDHDSKTGVDPDSAQRLIRELYSLLDFLRNDFSHNRLDGTTFEHLEVS |
| | ID No. | PDISSFITGTYSLACGRAQSRFADFFKPDDFVLAKNRKEQLISVADGKE |
| | 129) | CLTVSGLAFFICLFLDREQASGMLSRIRGFKRTDENWARAVHETFCDL |
| | | CIRHPHDRLESSNTKEALLLDMLNELNRCPRILYDMLPEEERAQFLPA |
| | | LDENSMNNLSENSLNEESRLLWDGSSDWAEALTKRIRHQDRFPYLML |
| | | RFIEEMDLLKGIRFRVDLGEIELDSYSKKVGRNGEYDRTITDHALAFG |
| | | KLSDFQNEEEVSRMISGEASYPVRFSLFAPRYAIYDNKIGYCHTSDPVY |
| | | PKSKTGEKRALSNPRSMGFISVHDLRKLLLMELLCEGSFSRMQSDFLR |
| | | KANRILDETAEGKLQFSALFPEMRHRFIPPQNPKSKDRREKAETTLEK |
| | | YKQEIKGRKDKLNSQLLSAFDMDQRQLPSRLLDEWMNIRPASHSVKL |
| | | RTYVKQLNEDCRLRLQKFRKDGDGKARAIPLVGEMATFLSQDIVRMII |
| | | SEETKKLITSAYYNEMQRSLAQYAGEENRHQFRAIVAELRLLDPSSGH |
| | | PFLSATMETAHRYTEDFYKCYLEKKREWLAKTFYRPEQDENTKRRIS |
| | | VFFVPDGEARKLLPLLIRRRMKEQNDLQDWIRNKQAHPIDLPSHLFDS |
| | | KVMELLKVKDGKKKWNEAFKDWWSTKYPDGMQPFYGLRRELNIHG |
| | | KSVSYIPSDGKKFADCYTHLMEKTVRDKKRELRTAGKPVPPDLAAYI |
| | | KRSFHRAVNEREFMLRLVQEDDRLMLMAINKIMTDREEDILPGLKNI |
| | | DSILDKENQFSLAVHAKVLEKEGEGGDNSLSLVPATIEIKSKRKDWSK |
| | | YIRYRYDRRVPGLMSHFPEHKATLDEVKTLLGEYDRCRIKIFDWAFAL |
| | | EGAIMSDRDLKPYLHESSSREGKSGEHSTLVKMLVEKKGCLTPDESQ |
| | | YLILIRNKAAHNQFPCAAEIPLIYRDVSAKVGSIEGSSAKDLPEGSSLV |
| | | DSLWKKYEMIIRKILPILDPENRFFGKLLNNMSQPINDL |
| Porphyromonas | WP_ | MNTVPASENKGQSRTVEDDPQYFGLYLNLARENLIEVESHVRIKFGK |
| gingivalis | 023846767 | KKLNEESLKQSLLCDHLLSVDRWTKVYGHSRRYLPFLHYFDPDSQIE |
| | (SEQ | KDHDSKTGVDPDSAQRLIRELYSLLDFLRNDFSHNRLDGTTFEHLEVS |
| | ID No. | PDISSFITGTYSLACGRAQSRFADFFKPDDFVLAKNRKEQLISVADGKE |
| | 130) | CLTVSGLAFFICLFLDREQASGMLSRIRGFKRTDENWARAVHETFCDL |
| | | CIRHPHDRLESSNTKEALLLDMLNELNRCPRILYDMLPEEERAQFLPA |
| | | LDENSMNNLSENSLNEESRLLWDGSSDWAEALTKRIRHQDRFPYLML |
| | | RFIEEMDLLKGIRFRVDLGEIELDSYSKKVGRNGEYDRTITDHALAFG |
| | | KLSDFQNEEEVSRMISGEASYPVRFSLFAPRYAIYDNKIGYCHTSDPVY |
| | | PKSKTGEKRALSNPRSMGFISVHDLRKLLLMELLCEGSFSRMQSDFLR |
| | | KANRILDETAEGKLQFSALFPEMRHRFIPPQNPKSKDRREKAETTLEK |
| | | YKQEIKGRKDKLNSQLLSAFDMNQRQLPSRLLDEWMNIRPASHSVKL |
| | | RTYVKQLNEDCRLRLRKFRKDGDGKARAIPLVGEMATFLSQDIVRMII |
| | | SEETKKLITSAYYNEMQRSLAQYAGEENRRQFRAIVAELHLLDPSSGH |
| | | PFLSATMETAHRYTEDFYKCYLEKKREWLAKTFYRPEQDENTKRRIS |
| | | VFFVPDGEARKLLPLLIRRRMKEQNDLQDWIRNKQAHPIDLPSHLFDS |
| | | KIMELLKVKDGKKKWNEAFKDWWSTKYPDGMQPFYGLRRELNIHG |
| | | KSVSYIPSDGKKFADCYTHLMEKTVQDKKRELRTAGKPVPPDLAADI |
| | | KRSFHRAVNEREFMLRLVQEDDRLMLMAINKMMTDREEDILPGLKNI |
| | | DSILDEENQFSLAVHAKVLEKEGEGGDNSLSLVPATIEIKSKRKDWSK |
| | | YIRYRYDRRVPGLMSHFPEHKATLDEVKTLLGEYDRCRIKIFDWAFAL |
| | | EGAIMSDRDLKPYLHESSSREGKSGEHSTLVKMLVEKKGCLTPDESQ |
| | | YLILIRNKAAHNQFPCAAEMPLIYRDVSAKVGSIEGSSAKDLPEGSSLV |
| | | DSLWKKYEMIIRKILPILDPENRFFGKLLNNMSQPINDL |
| Prevotella | WP_ | MKNDNNSTKSTDYTLGDKHFWAAFLNLARHNVYITVNHINKVLELK |
| falsenii | 036884929 | NKKDQEIIIDNDQDILAIKTLWGKVDTDINKKDRLRELIMKHFPFLEAA |
| | (SEQ | TYQQSSTNNTKQKEEEQAKAQSFESLKDCLFLFLEKLREARNYYSHY |
| | ID No. | KHSKSLEEPKLEEKLLENMYNIFDTNVQLVIKDYEHNKDINPEEDFKH |
| | 131) | LGRAEGEFNYYFTRNKKGNITESGLLFFVSLFLEKKDAIWAQTKIKGF |
| | | KDNRENKQKMTHEVFCRSRMLLPKLRLESTQTQDWILLDMLNELIRC |
| | | PKSLYKRLQGEKREKFRVPFDPADEDYDAEQEPFKNTLVRHQDRFPY |
| | | FALRYFDYNEIFTNLRFQIDLGTYHFSIYKKQIGDKKEDRHLTHKLYGF |
| | | ERIQEFAKENRPDEWKALVKDLDTFEESNEPYISETTPHYHLENQKIGI |
| | | RNKNKKKKKTIWPSLETKTTVNERSKYNLGKSFKAEAFLSVHELLPM |
| | | MFYYLLLNKEEPNNGKINASKVEGIIEKKIRDIYKLYGAFANEEINNEE |
| | | ELKEYCEGKDIAIRHLPKQMIAILKNEYKDMAKKAEDKQKKMIKDTK |
| | | KRLAALDKQVKGEVEDGGRNIKPLKSGRIASWLVNDMMRFQPVQRD |
| | | RDGYPLNNSKANSTEYQLLQRTLALFGSERERLAPYFRQMNLIGKDN |
| | | PHPFLKDTKWKEHNNILSFYRSYLEAKKNFLGSLKPEDWKKNQYFLK |
| | | LKEPKTNRETLVQGWKNGFNLPRGIFTEPIREWFIRHQNESEEYKKVK |
| | | DFDRIGLVAKVIPLFFKEDYQKEIEDYVQPFYGYPFNVGNIHNSQEGTF |
| | | LNKKEREELWKGNKTKFKDYKTKEKNKEKTNKDKFKKKTDEEKEEF |
| | | RSYLDFQSWKKFERELRLVRNQDIVTWLLCMELIDKLKIDELNIEELQ |
| | | KLRLKDIDTDTAKKEKNNILNRIMPMELPVTVYETDDSNNIIKDKPLH |
| | | TIYIKEAETKLLKQGNFKALVKDRRLNGLFSFVETSSEAELKSKPISKS |
| | | LVEYELGEYQRARVEIIKDMLRLEETLIGNDEKLPTNKFRQMLDKWL |
| | | EHKKETDDTDLKNDVKLLTEVRNAFSHNQYPMRDRIAFANIKPFSLSS |
| | | ANTSNEEGLGIAKKLKDKTKETIDRIIEIEEQTATKR |
| Prevotella | WP_ | MENDKRLEESTCYTLNDKHFWAAFLNLARHNVYITINHINKLLEIRQI |
| pleuritidis | 036931485 | DNDEKVLDIKALWQKVDKDINQKARLRELMIKHFPFLEAAIYSNNKE |
| | (SEQ | DKEEVKEEKQAKAQSFKSLKDCLFLFLEKLQEARNYYSHYKSSESSK |
| | ID No. | EPEFEEGLLEKMYNTFGVSIRLVKEDYQYNKDIDPEKDFKHLERKEDF |
| | 132) | NYLFTDKDNKGKITKNGLLFFVSLFLEKKDAIWMQQKLRGFKDNRG |
| | | NKEKMTHEVFCRSRMLLPKIRLESTQTQDWILLDMLNELIRCPKSLYE |
| | | RLQGAYREKFKVPFDSIDEDYDAEQEPFRNTLVRHQDRFPYFALRYFD |
| | | YNEIFKNLRFQIDLGTYHFSIYKKLIGDNKEDRHLTHKLYGFERIQEFA |
| | | KQKRPNEWQALVKDLDIYETSNEQYISETTPHYHLENQKIGIRFKNKK |
| | | DKIWPSLETNGKENEKSKYNLDKSFQAEAFLSIHELLPMMFYDLLLKK |
| | | EEPNNDEKNASIVEGFIKKEIKRMYAIYDAFANEEINSKEGLEEYCKN |
| | | KGFQERHLPKQMIAILTNKSKNMAEKAKRKQKEMIKDTKKRLATLD |
| | | KQVKGEIEDGGRNIRLLKSGEIARWLVNDMMRFQSVQKDKEGKPLN |
| | | NSKANSTEYQMLQRSLALYNKEQKPTPYFIQVNLIKSSNPHPFLEETK |
| | | WEECNNILSFYRSYLEAKKNFLESLKPEDWKKNQYFLMLKEPKTNRK |
| | | TLVQGWKNGFNLPRGIFTEPIKEWFKRHQNDSEEYKKVEALDRVGLV |
| | | AKVIPLFFKEEYFKEDAQKEINNCVQPFYSFPYNVGNIHKPEEKNFLHC |
| | | EERRKLWDKKKDKFKGYKAKEKSKKMTDKEKEEHRSYLEFQSWNK |
| | | FERELRLVRNQDIVTWLLCTELIDKLKIDELNIEELQKLRLKDIDTDTA |
| | | KKEKNNILNRIMPMQLPVTVYEIDKSFNIVKDKPLHTIYIEETGTKLLK |
| | | QGNFKALVKDRRLNGLFSFVKTSSEAESKSKPISKLRVEYELGAYQKA |
| | | RIDIIKDMLALEKTLIDNDENLPTNKFSDMLKSWLKGKGEANKARLQ |
| | | NDVDLLVAIRNAFSHNQYPMYNSEVFKGMKLLSLSSDIPEKEGLGIAK |
| | | QLKDKIKETIERIIEIEKEIRN |
| [Porphyromonas | WP_ | MTEQNERPYNGTYYTLEDKHFWAAFFNLARHNAYITLAHIDRQLAYS |
| gingivalis | 039417390 | KADITNDEDILFFKGQWKNLDNDLERKARLRSLILKHFSFLEGAAYGK |
| | (SEQ | KLFESQSSGNKSSKKKELTKKEKEELQANALSLDNLKSILFDFLQKLK |
| | ID No. | DFRNYYSHYRHPESSELPLFDGNMLQRLYNVFDVSVQRVKRDHEHN |
| | 133) | DKVDPHRHFNHLVRKGKKDRYGNNDNPFFKHHFVDREGTVTEAGLL |
| | | FFVSLFLEKRDAIWMQKKIRGFKGGTEAYQQMTNEVFCRSRISLPKLK |
| | | LESLRTDDWMLLDMLNELVRCPKSLYDRLREEDRARFRVPIDILSDED |
| | | DTDGTEEDPFKNTLVRHQDRFPYFALRYFDLKKVFTSLRFHIDLGTYH |
| | | FAIYKKNIGEQPEDRHLTRNLYGFGRIQDFAEEHRPEEWKRLVRDLDY |
| | | FETGDKPYITQTTPHYHIEKGKIGLRFVPEGQHLWPSPEVGATRTGRS |
| | | KYAQDKRLTAEAFLSVHELMPMMFYYFLLREKYSEEVSAEKVQGRIK |
| | | RVIEDVYAVYDAFARGEIDTLDRLDACLADKGIRRGHLPRQMIAILSQ |
| | | EHKDMEEKVRKKLQEMIADTDHRLDMLDRQTDRKIRIGRKNAGLPK |
| | | SGVIADWLVRDMMRFQPVAKDTSGKPLNNSKANSTEYRMLQRALAL |
| | | FGGEKERLTPYFRQMNLTGGNNPHPFLHETRWESHTNILSFYRSYLKA |
| | | RKAFLQSIGRSDREENHRFLLLKEPKTDRQTLVAGWKSEFHLPRGIFT |
| | | EAVRDCLIEMGYDEVGSYKEVGFMAKAVPLYFERACKDRVQPFYDY |
| | | PFNVGNSLKPKKGRFLSKEKRAEEWESGKERFRLAKLKKEILEAKEHP |
| | | YLDFKSWQKFERELRLVKNQDIITWMMCRDLMEENKVEGLDTGTLY |
| | | LKDIRTDVHEQGSLNVLNRVKPMRLPVVVYRADSRGHVHKEQAPLA |
| | | TVYIEERDTKLLKQGNFKSFVKDRRLNGLFSFVDTGALAMEQYPISKL |
| | | RVEYELAKYQTARVCAFEQTLELEESLLTRYPHLPDKNFRKMLESWS |
| | | DPLLDKWPDLHRKVRLLIAVRNAFSHNQYPMYDEAVFSSIRKYDPSSP |
| | | DAIEERMGLNIAHRLSEEVKQAKEMAERIIQV |
| Porphyromonas | WP_ | MTEQSERPYNGTYYTLEDKHFWAAFLNLARHNAYITLTHIDRQLAYS |
| gulae | 039418912 | KADITNDQDVLSFKALWKNLDNDLERKSRLRSLILKHFSFLEGAAYG |
| | (SEQ | KKLFESKSSGNKSSKNKELTKKEKEELQANALSLDNLKSILFDFLQKL |
| | ID No. | KDFRNYYSHYRHSGSSELPLFDGNMLQRLYNVFDVSVQRVKRDHEH |
| | 134) | NDKVDPHRHFNHLVRKGKKDRYGHNDNPSFKHHFVDSEGMVTEAG |
| | | LLFFVSLFLEKRDAIWMQKKIRGFKGGTETYQQMTNEVFCRSRISLPK |
| | | LKLESLRMDDWMLLDMLNELVRCPKPLYDRLREDDRACFRVPVDILP |
| | | DEDDTDGGGEDPFKNTLVRHQDRFPYFALRYFDLKKVFTSLRFHIDL |
| | | GTYHFAIYKKMIGEQPEDRHLTRNLYGFGRIQDFAEEHRPEEWKRLV |
| | | RDLDYFETGDKPYISQTSPHYHIEKGKIGLRFMPEGQHLWPSPEVGTT |
| | | RTGRSKYAQDKRLTAEAFLSVHELMPMMFYYFLLREKYSEEVSAEK |
| | | VQGRIKRVIEDVYAIYDAFARDEINTLKELDACLADKGIRRGHLPKQM |
| | | TAILSQEHKNMEEKVRKKLQEMIADTDHRLDMLDRQTDRKIRIGRKN |
| | | AGLPKSGVIADWLVRDMMRFQPVAKDASGKPLNNSKANSTEYRMLQ |
| | | RALALFGGEKERLTPYFRQMNLTGGNNPHPFLHDTRWESHTNILSFY |
| | | RSYLRARKAFLERIGRSDRMENRPFLLLKEPKTDRQTLVAGWKSEFH |
| | | LPRGIFTEAVRDCLIEMGYDEVGSYREVGFMAKAVPLYFERACEDRV |
| | | QPFYDSPFNVGNSLKPKKGRFLSKEERAEEWERGKERFRDLEAWSHS |
| | | AARRIEDAFAGIEYASPGNKKKIEQLLRDLSLWEAFESKLKVRADKIN |
| | | LAKLKKEILEAQEHPYHDFKSWQKFERELRLVKNQDIITWMMCRDL |
| | | MEENKVEGLDTGTLYLKDIRTNVQEQGSLNVLNHVKPMRLPVVVYR |
| | | ADSRGHVHKEEAPLATVYIEERDTKLLKQGNFKSFVKDRRLNGLFSF |
| | | VDTGGLAMEQYPISKLRVEYELAKYQTARVCAFEQTLELEESLLTRYP |
| | | HLPDKNFRKMLESWSDPLLAKWPELHGKVRLLIAVRNAFSHNQYPM |
| | | YDEAVFSSIRKYDPSSPDAIEERMGLNIAHRLSEEVKQAKETVERIIQA |
| Porphyromonas | WP_ | MTEQSERPYNGTYYTLEDKHFWAAFLNLARHNAYITLTHIDRQLAYS |
| gulae | 039419792 | KADITNDQDVLSFKALWKNLDNDLERKSRLRSLILKHFSFLEGAAYG |
| | (SEQ | KKLFESKSSGNKSSKNKELTKKEKEELQANALSLDNLKSILFDFLQKL |
| | ID No. | KDFRNYYSHYRHSGSSELPLFDGNMLQRLYNVFDVSVQRVKRDHEH |
| | 135) | NDKVDPHRHFNHLVRKGKKDRYGHNDNPSFKHHFVDGEGMVTEAG |
| | | LLFFVSLFLEKRDAIWMQKKIRGFKGGTETYQQMTNEVFCRSRISLPK |
| | | LKLESLRTDDWMLLDMLNELVRCPKPLYDRLREKDRARFRVPVDILP |
| | | DEDDTDGGGEDPFKNTLVRHQDRFPYFALRYFDLKKVFTSLRFHIDL |
| | | GTYHFAIYKKVIGEQPEDRHLTRNLYGFGRIQDFAEEHRPEEWKRLVR |
| | | DLDYFETGDKPYISQTTPHYHIEKGKIGLRFVPEGQHLWPSPEVGTTRT |
| | | GRSKYAQDKRLTAEAFLSVHELMPMMFYYFLLREKYSEEVSAEKVQ |
| | | GRIKRVIEDVYAIYDAFARDEINTRDELDACLADKGIRRGHLPKQMIGI |
| | | LSQEHKNMEEKVRKKLQEMIADTDHRLDMLDRQTDRKIRIGRKNAG |
| | | LPKSGVIADWLVRDMMRFQPVAKDTSGKPLNNSKANSTEYRMLQRA |
| | | LALFGGEKERLTPYFRQMNLTGGNNPHPFLDETRWESHTNILSFYRSY |
| | | LRARKAFLERIGRSDRVENRPFLLLKEPKTDRQTLVAGWKSEFHLPRG |
| | | IFTEAVRDCLIEMGYDEVGSYKEVGFMAKAVPLYFERACKDRVQPFY |
| | | DSPFNVGNSLKPKKGRFLSKEKRAEEWESGKERFRLAKLKKEILEAQE |
| | | HPYHDFKSWQKFERELRLVKNQDIITWMMCRDLMEENKVEGLDTGT |
| | | LYLKDIRPNVQEQGSLNVLNRVKPMRLPVVVYRADSRGHVHKEEAP |
| | | LATVYIEERDTKLLKQGNFKSFVKDRRLNGLFSFVDTGGLAMEQYPIS |
| | | KLRVEYELAKYQTARVCVFELTLRLEESLLSRYPHLPDESFREMLESW |
| | | SDPLLAKWPELHGKVRLLIAVRNAFSHNQYPMYDEAVFSSIRKYDPSS |
| | | PDAIEERMGLNIAHRLSEEVKQAKETVERIIQA |
| Porphyromonas | WP_ | MTEQSERPYNGTYYTLEDKHFWAAFLNLARHNAYITLTHIDRQLAYS |
| gulae | 039426176 | KADITNDQDVLSFKALWKNFDNDLERKSRLRSLILKHFSFLEGAAYG |
| | (SEQ | KKLFESKSSGNKSSKNKELTKKEKEELQANALSLDNLKSILFDFLQKL |
| | ID No. | KDFRNYYSHYRHSGSSELPLFDGNMLQRLYNVFDVSVQRVKRDHEH |
| | 136) | NDKVDPHYHFNHLVRKGKKDRYGHNDNPSFKHHFVDSEGMVTEAG |
| | | LLFFVSLFLEKRDAIWMQKKIRGFKGGTGPYEQMTNEVFCRSRISLPK |
| | | LKLESLRTDDWMLLDMLNELVRCPKPLYDRLREKDRACFRVPVDILP |
| | | DEDDTDGGGEDPFKNTLVRHQDRFPYFALRYFDLKKVFTSLRFHIDL |
| | | GTYHFAIYKKMIGEQPEDRHLTRNLYGFGRIQDFAEEHRPEEWKRLV |
| | | RDLDYFETGDKPYISQTTPHYHIEKGKIGLRFMPEGQHLWPSPEVGTT |
| | | RTGRSKYAQDKRLTAEAFLSVHELMPMMFYYFLLREKYSEEVSAEK |
| | | VQGRIKRVIKDVYAIYDAFARDEINTLKELDACSADKGIRRGHLPKQM |
| | | IGILSQEHKNMEEKVRKKLQEMIADTDHRLDMLDRQTDRKIRIGRKN |
| | | AGLPKSGVIADWLVRDMMRFQPVAKDTSGKPLNNSKANSTEYRMLQ |
| | | RALALFGGEKERLTPYFRQMNLTGGNNPHPFLDETRWESHTNILSFYR |
| | | SYLRARKAFLERIGRSDRVENRPFLLLKEPKNDRQTLVAGWKSEFHLP |
| | | RGIFTEAVRDCLIEMGYDEVGSYKEVGFMAKAVPLYFERACKDRVQP |
| | | FYDSPFNVGNSLKPKKGRFLSKEKRAEEWESGKERFRLAKLKKEILEA |
| | | KEHPYHDFKSWQKFERELRLVKNQDIITWMMCRDLMEENKVEGLDT |
| | | GTLYLKDIRTDVHEQGSLNVLNRVKPMRLPVVVYRADSRGHVHKEQ |
| | | APLATVYIEERDTKLLKQGNFKSFVKDRRLNGLFSFVDTGGLAMEQY |
| | | PISKLRVEYELAKYQTARVCAFEQTLELEESLLTRYPHLPDENFREML |
| | | ESWSDPLLGKWPDLHGKVRLLIAVRNAFSHNQYPMYDEAVFSSIRKY |
| | | DPSSPDAIEERMGLNIAHRLSEEVKQAKETVERIIQA |
| Porphyromonas | WP_ | MTEQSERPYNGTYYTLEDKHFWAAFLNLARHNAYITLTHIDRQLAYS |
| gulae | 039431778 | KADITNDQDVLSFKALWKNFDNDLERKSRLRSLILKHFSFLEGAAYG |
| | (SEQ | KKLFESKSSGNKSSKNKELTKKEKEELQANALSLDNLKSILFDFLQKL |
| | ID No. | KDFRNYYSHYRHSESSELPLFDGNMLQRLYNVFDVSVQRVKRDHEH |
| | 137) | NDKVDPHRHFNHLVRKGKKDRYGHNDNPSFKHHFVDGEGMVTEAG |
| | | LLFFVSLFLEKRDAIWMQKKIRGFKGGTETYQQMTNEVFCRSRISLPK |
| | | LKLESLRTDDWMLLDMLNELVRCPKPLYDRLREDDRACFRVPVDILP |
| | | DEDDTDGGGEDPFKNTLVRHQDRFPYFALRYFDLKKVFTSLRFHIDL |
| | | GTYHFAIYKKMIGEQPEDRHLTRNLYGFGRIQDFAEEHRPEEWKRLV |
| | | RDLDYFETGDKPYISQTSPHYHIEKGKIGLRFMPEGQHLWPSPEVGTT |
| | | RTGRSKYAQDKRLTAEAFLSVHELMPMMFYYFLLREKYSEEVSAEK |
| | | VQGRIKRVIEDVYAIYDAFARDEINTLKELDACLADKGIRRGHLPKQM |
| | | TAILSQEHKDMEEKIRKKLQEMIADTDHRLDMLDRQTDRKIRIGRKNA |
| | | GLPKSGVIADWLVRDMMRFQPVAKDTSGKPLNNSKANSTEYRMLQR |
| | | ALALFGGEKKRLTPYFRQMNLTGGNNPHPFLHETRWESHTNILSFYRS |
| | | YLRARKAFLERIGRSDRMENRPFLLLKEPKTDRQTLVAGWKSEFHLP |
| | | RGIFTEAVRDCLIEMGYDEVGSYREVGFMAKAVPLYFERACEDRVQP |
| | | FYDSPFNVGNSLKPKKGRFLSKEERAEEWERGKERFRDLEAWSHSAA |
| | | RRIEDAFAGIEYASPGNKKKIEQLLRDLSLWEAFESKLKVRADKINLA |
| | | KLKKEILEAQEHPYHDFKSWQKFERELRLVKNQDIITWMMCRDLMEE |
| | | NKVEGLDTGTLYLKDIRPNVQEQGSLNVLNRVKPMRLPVVVYRADS |
| | | RGHVHKEEAPLATVYIEERDTKLLKQGNFKSFVKDRRLNGLFSFVDT |
| | | GGLAMEQYPISKLRVEYELAKYQTARVCVFELTLRLEESLLTRYPHLP |
| | | DESFRKMLESWSDPLLAKWPELHGKVRLLIAVRNAFSHNQYPMYDE |
| | | AVFSSIRKYDPSSPDAIEERMGLNIAHRLSEEVKQAKETVERIIQV |
| Porphyromonas | WP_ | MTEQSERPYNGTYYTLEDKHFWAAFLNLARHNAYITLTHIDRQLAYS |
| gulae | 039437199 | KADITNDEDILFFKGQWKNLDNDLERKSRLRSLILKHFSFLEGAAYGK |
| | (SEQ | KFFESKSSGNKSSKNKELTKKEKEELQANALSLDNLKSILFDFLQKLK |
| | ID No. | DFRNYYSHYRHSGSSELPLFDGNMLQRLYNVFDVSVQRVKRDHEHN |
| | 138) | DEVDPHYHFNHLVRKGKKDRYGHNDNPSFKHHFVDGEGMVTEAGL |
| | | LFFVSLFLEKRDAIWMQKKIRGFKGGTEPYEQMTNEVFCRSRISLPKL |
| | | KLESLRTDDWMLLDMLNELVRCPKPLYDRLREKDRACFRVPVDILPD |
| | | EDDTDGGGEDPFKNTLVRHQDRFPYFALRYFDLKKVFTSLRFHIDLGT |
| | | YHFAIYKKMIGEQPEDRHLTRNLYGFGRIQDFAEEHRPEEWKRLVRD |
| | | LDYFETGDKPYISQTTPHYHIEKGKIGLRFVPEGQHLWPSPEVGTTRTG |
| | | RSKYAQDKRLTAEAFLSVHELMPMMFYYFLLREKYSEEVSAEKVQG |
| | | RIKRVIEDVYAIYDAFARDEINTLKELDACLADKGIRRGHLPKQMIGIL |
| | | SQERKDMEEKVRKKLQEMIADTDHRLDMLDRQTDRKIRIGRKNAGL |
| | | PKSGVIADWLVRDMMRFQPVAKDTSGKPLNNSKANSTEYRMLQRAL |
| | | ALFGGEKERLTPYFRQMNLTGGNNPHPFLHETRWESHTNILSFYRSYL |
| | | RARKAFLERIGRSDRVENCPFLLLKEPKTDRQTLVAGWKGEFHLPRGI |
| | | FTEAVRDCLIEMGYDEVGSYREVGFMAKAVPLYFERACEDRVQPFYD |
| | | SPFNVGNSLKPKKGRFLSKEKRAEEWESGKERFRLAKLKKEILEAQEH |
| | | PYHDFKSWQKFERELRLVKNQDIITWMMCRDLMEENKVEGLDTGTL |
| | | YLKDIRPNVQEQGSLNVLNRVKPMRLPVVVYRADSRGHVHKEEAPL |
| | | ATVYIEERDTKLLKQGNFKSFVKDRRLNGLFSFVDTGALAMEQYPISK |
| | | LRVEYELAKYQTARVCAFEQTLELEESLLTRYPHLPDESFREMLESWS |
| | | DPLLTKWPELHGKVRLLIAVRNAFSHNQYPMYDEAVFSSIWKYDPSS |
| | | PDAIEERMGLNIAHRLSEEVKQAKETIERIIQA |
| Porphyromonas | WP_ | MTEQSERPYNGTYYTLEDKHFWAAFLNLARHNAYITLTHIDRQLAYS |
| gulae | 039442171 | KADITNDQDVLSFKALWKNLDNDLERKSRLRSLILKHFSFLEGAAYG |
| | (SEQ | KKLFESKSSGNKSSKNKELTKKEKEELQANALSLDNLKSILFDFLQKL |
| | ID No. | KDFRNYYSHYRHSGSSELPLFDGNMLQRLYNVFDVSVQRVKRDHEH |
| | 139) | NDKVDPHYHFNHLVRKGKKDRYGHNDNPSFKHHFVDSEGMVTEAG |
| | | LLFFVSLFLEKRDAIWMQKKIRGFKGGTGPYEQMTNEVFCRSRISLPK |
| | | LKLESLRTDDWMLLDMLNELVRCPKPLYDRLREKDRACFRVPVDILP |
| | | DEDDTDGGGEDPFKNTLVRHQDRFPYFALRYFDLKKVFTSLRFHIDL |
| | | GTYHFAIYKKMIGEQPEDRHLTRNLYGFGRIQDFAEEHRPEEWKRLV |
| | | RDLDYLETGDKPYISQTTPHYHIEKGKIGLRFVPEGQHLWPSPEVGTT |
| | | RTGRSKCAQDKRLTAEAFLSVHELMPMMFYYFLLREKYSEEVSAEKV |
| | | QGRIKRVIEDVYAIYDAFARDEINTLKELDTCLADKGIRRGHLPKQMI |
| | | TILSQERKDMKEKIRKKLQEMIADTDHRLDMLDRQTDRKIRIGRKNA |
| | | GLPKSGVIADWLVRDMMRFQPVAKDASGKPLNNSKANSTEYRMLQR |
| | | ALALFGGEKERLTPYFRQMNLTGGNNPHPFLHETRWESHTNILSFYRS |
| | | YLRARKAFLERIGRSDRVENCPFLLLKEPKTDRQTLVAGWKDEFHLP |
| | | RGIFTEAVRDCLIEMGYDEVGSYREVGFMAKAVPLYFERACEDRVQP |
| | | FYDSPFNVGNSLKPKKGRFLSKEDRAEEWERGMERFRDLEAWSHSA |
| | | ARRIKDAFAGIEYASPGNKKKIEQLLRDLSLWEAFESKLKVRADKINL |
| | | AKLKKEILEAQEHPYHDFKSWQKFERELRLVKNQDIITWMMCRDLM |
| | | EENKVEGLDTGTLYLKDIRPNVQEQGSLNVLNRVKPMRLPVVVYRA |
| | | DSRGHVHKEAPLATVYIEERNTKLLKQGNFKSFVKDRRLNGLFSFVD |
| | | TGGLAMEQYPISKLRVEYELAKYQTARVCVFELTLRLEESLLSRYPHL |
| | | PDESFREMLESWSDPLLAKWPELHGKVRLLIAVRNAFSHNQYPMYDE |
| | | AVFSSIRKYDPSSPDAIEERMGLNIAHRLSEEVKQAKETVERIIQA |
| Porphyromonas | WP_ | MNTVPATENKGQSRTVEDDPQYFGLYLNLARENLIEVESHVRIKFGK |
| gulae | 039445055 | KKLNEESLKQSLLCDHLLSIDRWTKVYGHSRRYLPFLHCFDPDSGIEK |
| | (SEQ | DHDSKTGVDPDSAQRLIRELYSLLDFLRNDFSHNRLDGTTFEHLKVSP |
| | ID No. | DISSFITGAYTFACERAQSRFADFFKPDDFLLAKNRKEQLISVADGKEC |
| | 140) | LTVSGFAFFICLFLDREQASGMLSRIRGFKRTDENWARAVHETFCDLC |
| | | IRHPHDRLESSNTKEALLLDMLNELNRCPRILYDMLPEEERAQFLPAL |
| | | DENSMNNLSENSLNEESRLLWDGSSDWAEALTKRIRHQDRFPYLMLR |
| | | FIEEMDLLKGIRFRVDLGEIELDSYSKKVGRNGEYDRTITDHALAFGK |
| | | LSDFQNEEEVSRMISGEASYPVRFSLFAPRYAIYDNKIGYCHTSDPVYP |
| | | KSKTGEKRALSNPQSMGFISVHDLRKLLLMELLCEGSFSRMQSDFLRK |
| | | ANRILDETAEGKLQFSALFPEMRHRFIPPQNPKSKDRREKAETTLEKY |
| | | KQEIKGRKDKLNSQLLSAFDMNQRQLPSRLLDEWMNIRPASHSVKLR |
| | | TYVKQLNEDCRLRLRKFRKDGDGKARAIPLVGEMATFLSQDIVRMIIS |
| | | EETKKLITSAYYNEMQRSLAQYAGEENRRQFRAIVAELHLLDPSSGHP |
| | | FLSATMETAHRYTEDFYKCYLEKKREWLAKTFYRPEQDENTKRRISV |
| | | FFVPDGEARKLLPLLIRRRMKEQNDLQDWIRNKQAHPIDLPSHLFDSK |
| | | IMELLKVKDGKKKWNEAFKDWWSTKYPDGMQPFYGLRRELNIHGK |
| | | SVSYIPSDGKKFADCYTHLMEKTVRDKKRELRTAGKPVPPDLAAYIK |
| | | RSFHRAVNEREFMLRLVQEDDRLMLMAINKMMTDREEDILPGLKNID |
| | | SILDEENQFSLAVHAKVLEKEGEGGDNSLSLVPATIEIKSKRKDWSKYI |
| | | RYRYDRRVPGLMSHFPEHKATLDEVKTLLGEYDRCRIKIFDWAFALE |
| | | GAIMSDRDLKPYLHESSSREGKSGEHSTLVKMLVEKKGCLTPDESQY |
| | | LILIRNKAAHNQFPCAAEMPLIYRDVSAKVGSIEGSSAKDLPEGSSLVD |
| | | SLWKKYEMIIRKILPILDHENRFFGKLLNNMSQPINDL |
| Capno- | WP_ | MENKTSLGNNIYYNPFKPQDKSYFAGYLNAAMENIDSVFRELGKRLK |
| cytophaga | 041989581 | GKEYTSENFFDAIFKENISLVEYERYVKLLSDYFPMARLLDKKEVPIKE |
| cynodegmi | (SEQ | RKENFKKNFRGIIKAVRDLRNFYTHKEHGEVEITDEIFGVLDEMLKST |
| | ID No. | VLTVKKKKIKTDKTKEILKKSIEKQLDILCQKKLEYLKDTARKIEEKRR |
| | 141) | NQRERGEKKLVPRFEYSDRRDDLIAAIYNDAFDVYIDKKKDSLKESSK |
| | | TKYNTESYPQQEEGDLKIPISKNGVVFLLSLFLSKQEVHAFKSKIAGFK |
| | | ATVIDEATVSHRKNSICFMATHEIFSHLAYKKLKRKVRTAEINYSEAE |
| | | NAEQLSIYAKETLMMQMLDELSKVPDVVYQNLSEDVQKTFIEDWNE |
| | | YLKENNGDVGTMEEEQVIHPVIRKRYEDKFNYFAIRFLDEFAQFPTLR |
| | | FQVHLGNYLHDSRPKEHLISDRRIKEKITVFGRLSELEHKKALFIKNTE |
| | | TNEDRKHYWEVFPNPNYDFPKENISVNDKDFPIAGSILDREKQPTAGK |
| | | IGIKVNLLNQKYISEVDKAVKAHQLKQRNNKPSIQNIIEEIVPINGSNPK |
| | | EIIVFGGQPTAYLSMNDIHSILYEFFDKWEKKKEKLEKKGEKELRKEIG |
| | | KELEEKIVGKIQTQIQQIIDKDINAKILKPYQDDDSTAIDKEKLIKDLKQ |
| | | EQKILQKLKNEQTAREKEYQECIAYQEESRKIKRSDKSRQKYLRNQLK |
| | | RKYPEVPTRKEILYYQEKGKVAVWLANDIKRFMPTDFKNEWKGEQH |
| | | SLLQKSLAYYEQCKEELKNLLPQQKVFKHLPFELGGHFQQKYLYQFY |
| | | TRYLDKRLEHISGLVQQAENFKNENKVFKKVENECFKFLKKQNYTHK |
| | | GLDAQAQSVLGYPIFLERGFMDEKPTIIKGKTFKGNESLFTDWFRYYK |
| | | EYQNFQTFYDTENYPLVELEKKQADRKRETKIYQQKKNDVFTLLMA |
| | | KHIFKSVFKQDSIDRFSLEDLYQSREERLENQEKAKQTGERNTNYIWN |
| | | KTVDLNLCDGKVTVENVKLKNVGNFIKYEYDQRVQTFLKYEENIKW |
| | | QAFLIKESKEEENYPYIVEREIEQYEKVRREELLKEVHLIEEYILEKVKD |
| | | KEILKKGDNQNFKYYILNGLLKQLKNEDVESYKVFNLNTKPEDVNIN |
| | | QLKQEATDLEQKAFVLTYIRNKFAHNQLPKKEFWDYCQEKYGKIEKE |
| | | KTYAEYFAEVFKREKEALMK |
| Prevotella | WP_ | MNIPALVENQKKYFGTYSVMAMLNAQTVLDHIQKVADIEGEQNENN |
| sp. P5-119 | 042518169 | ENLWFHPVMSHLYNAKNGYDKQPEKTMFIIERLQSYFPFLKIMAENQ |
| | (SEQ | REYSNGKYKQNRVEVNSNDIFEVLKRAFGVLKMYRDLTNHYKTYEE |
| | ID No. | KLIDGCEFLTSTEQPLSGMISKYYTVALRNTKERYGYKTEDLAFIQDNI |
| | 142) | KKITKDAYGKRKSQVNTGFFLSLQDYNGDTQKKLHLSGVGIALLICLF |
| | | LDKQYINIFLSRLPIFSSYNAQSEERRIIIRSFGINSIKLPKDRIHSEKSNKS |
| | | VAMDMLNEVKRCPDELFTTLSAEKQSRFRIISDDHNEVLMKRSTDRF |
| | | VPLLLQYIDYGKLFDHIRFHVNMGKLRYLLKADKTCIDGQTRVRVIEQ |
| | | PLNGFGRLEEAETMRKQENGTFGNSGIRIRDFENVKRDDANPANYPYI |
| | | VDTYTHYILENNKVEMFISDKGSSAPLLPLIEDDRYVVKTIPSCRMSTL |
| | | EIPAMAFHMFLFGSKKTEKLIVDVHNRYKRLFQAMQKEEVTAENIAS |
| | | FGIAESDLPQKILDLISGNAHGKDVDAFIRLTVDDMLTDTERRIKRFKD |
| | | DRKSIRSADNKMGKRGFKQISTGKLADFLAKDIVLFQPSVNDGENKIT |
| | | GLNYRIMQSAIAVYDSGDDYEAKQQFKLMFEKARLIGKGTTEPHPFL |
| | | YKVFARSIPANAVDFYERYLIERKFYLTGLCNEIKRGNRVDVPFIRRD |
| | | QNKWKTPAMKTLGRIYSEDLPVELPRQMFDNEIKSHLKSLPQMEGIDF |
| | | NNANVTYLIAEYMKRVLNDDFQTFYQWKRNYHYMDMLKGEYDRK |
| | | GSLQHCFTSVEEREGLWKERASRTERYRKLASNKIRSNRQMRNASSE |
| | | EIETILDKRLSNCRNEYQKSEKVIRRYRVQDALLFLLAKKTLTELADF |
| | | DGERFKLKEIMPDAEKGILSEIMPMSFTFEKGGKKYTITSEGMKLKNY |
| | | GDFFVLASDKRIGNLLELVGSDIVSKEDIMEEFNKYDQCRPEISSIVFNL |
| | | EKWAFDTYPELSARVDREEKVDFKSILKILLNNKNINKEQSDILRKIRN |
| | | AFDHNNYPDKGIVEIKALPEIAMSIKKAFGEYAIMK |
| Prevotella | WP_ | MNIPALVENQKKYFGTYSVMAMLNAQTVLDHIQKVADIEGEQNENN |
| sp. P4-76 | 044072147 | ENLWFHPVMSHLYNAKNGYDKQPEKTMFIIERLQSYFPFLKIMAENQ |
| | (SEQ | REYSNGKYKQNRVEVNSNDIFEVLKRAFGVLKMYRDQASHYKTYDE |
| | ID No. | KLIDGCEFLTSTEQPLSGMINNYYTVALRNMNERYGYKTEDLAFIQDK |
| | 143) | RFKFVKDAYGKKKSQVNTGFFLSLQDYNGDTQKKLHLSGVGIALLIC |
| | | LFLDKQYINIFLSRLPIFSSYNAQSEERRIIIRSFGINSIKQPKDRIHSEKSN |
| | | KSVAMDMLNEIKRCPNELFETLSAEKQSRFRIISNDHNEVLMKRSSDR |
| | | FVPLLLQYIDYGKLFDHIRFHVNMGKLRYLLKADKTCIDGQTRVRVIE |
| | | QPLNGFGRLEEVETMRKQENGTFGNSGIRIRDFENMKRDDANPANYP |
| | | YIVDTYTHYILENNKVEMFISDEETPAPLLPVIEDDRYVVKTIPSCRMS |
| | | TLEIPAMAFHMFLFGSKKTEKLIVDVHNRYKRLFKAMQKEEVTAENI |
| | | ASFGIAESDLPQKIIDLISGNAHGKDVDAFIRLTVDDMLADTERRIKRF |
| | | KDDRKSIRSADNKMGKRGFKQISTGKLADFLAKDIVLFQPSVNDGEN |
| | | KITGLNYRIMQSAIAVYNSGDDYEAKQQFKLMFEKARLIGKGTTEPHP |
| | | FLYKVFVRSIPANAVDFYERYLIERKFYLIGLSNEIKKGNRVDVPFIRR |
| | | DQNKWKTPAMKTLGRIYDEDLPVELPRQMFDNEIKSHLKSLPQMEGI |
| | | DFNNANVTYLIAEYMKRVLNDDFQTFYQWKRNYRYMDMLRGEYDR |
| | | KGSLQSCFTSVEEREGLWKERASRTERYRKLASNKIRSNRQMRNASS |
| | | EEIETILDKRLSNSRNEYQKSEKVIRRYRVQDALLFLLAKKTLTELADF |
| | | DGERFKLKEIMPDAEKGILSEIMPMSFTFEKGGKKYTITSEGMKLKNY |
| | | GDFFVLASDKRIGNLLELVGSDTVSKEDIMEEFKKYDQCRPEISSIVFN |
| | | LEKWAFDTYPELSARVDREEKVDFKSILKILLNNKNINKEQSDILRKIR |
| | | NAFDHNNYPDKGVVEIRALPEIAMSIKKAFGEYAIMK |
| Prevotella | WP_ | MNIPALVENQKKYFGTYSVMAMLNAQTVLDHIQKVADIEGEQNENN |
| sp. P5-60 | 044074780 | ENLWFHPVMSHLYNAKNGYDKQPEKTMFIIERLQSYFPFLKIMAENQ |
| | (SEQ | REYSNGKYKQNRVEVNSNDIFEVLKRAFGVLKMYRDLTNHYKTYEE |
| | ID No. | KLIDGCEFLTSTEQPFSGMISKYYTVALRNTKERYGYKAEDLAFIQDN |
| | 144) | RYKFTKDAYGKRKSQVNTGSFLSLQDYNGDTTKKLHLSGVGIALLIC |
| | | LFLDKQYINLFLSRLPIFSSYNAQSEERRIIIRSFGINSIKQPKDRIHSEKS |
| | | NKSVAMDMLNEVKRCPDELFTTLSAEKQSRFRIISDDHNEVLMKRSS |
| | | DRFVPLLLQYIDYGKLFDHIRFHVNMGKLRYLLKADKTCIDGQTRVR |
| | | VIEQPLNGFGRLEEVETMRKQENGTFGNSGIRIRDFENMKRDDANPA |
| | | NYPYIVETYTHYILENNKVEMFISDEENPTPLLPVIEDDRYVVKTIPSCR |
| | | MSTLEIPAMAFHMFLFGSEKTEKLIIDVHDRYKRLFQAMQKEEVTAE |
| | | NIASFGIAESDLPQKIMDLISGNAHGKDVDAFIRLTVDDMLTDTERRIK |
| | | RFKDDRKSIRSADNKMGKRGFKQISTGKLADFLAKDIVLFQPSVNDGE |
| | | NKITGLNYRIMQSAIAVYDSGDDYEAKQQFKLMFEKARLIGKGTTEP |
| | | HPFLYKVFVRSIPANAVDFYERYLIERKFYLIGLSNEIKKGNRVDVPFI |
| | | RRDQNKWKTPAMKTLGRIYSEDLPVELPRQMFDNEIKSHLKSLPQME |
| | | GIDFNNANVTYLIAEYMKRVLNDDFQTFYQWKRNYRYMDMLRGEY |
| | | DRKGSLQHCFTSIEEREGLWKERASRTERYRKLASNKIRSNRQMRNA |
| | | SSEEIETILDKRLSNCRNEYQKSEKIIRRYRVQDALLFLLAKKTLTELA |
| | | DFDGERFKLKEIMPDAEKGILSEIMPMSFTFEKGGKIYTITSGGMKLKN |
| | | YGDFFVLASDKRIGNLLELVGSNTVSKEDIMEEFKKYDQCRPEISSIVF |
| | | NLEKWAFDTYPELPARVDRKEKVDFWSILDVLSNNKDINNEQSYILR |
| | | KIRNAFDHNNYPDKGIVEIKALPEIAMSIKKAFGEYAIMK |
| Phaeodactyl- | WP_ | MTNTPKRRTLHRHPSYFGAFLNIARHNAFMIMEHLSTKYDMEDKNTL |
| ibacter | 044218239 | DEAQLPNAKLFGCLKKRYGKPDVTEGVSRDLRRYFPFLNYPLFLHLE |
| xiamenensis | (SEQ | KQQNAEQAATYDINPEDIEFTLKGFFRLLNQMRNNYSHYISNTDYGKF |
| | ID No. | DKLPVQDIYEAAIFRLLDRGKHTKRFDVFESKHTRHLESNNSEYRPRS |
| | 145) | LANSPDHENTVAFVTCLFLERKYAFPFLSRLDCFRSTNDAAEGDPLIR |
| | | KASHECYTMFCCRLPQPKLESSDILLDMVNELGRCPSALYNLLSEEDQ |
| | | ARFHIKREEITGFEEDPDEELEQEIVLKRHSDRFPYFALRYFDDTEAFQ |
| | | TLRFDVYLGRWRTKPVYKKRIYGQERDRVLTQSIRTFTRLSRLLPIYE |
| | | NVKHDAVRQNEEDGKLVNPDVTSQFHKSWIQIESDDRAFLSDRIEHFS |
| | | PHYNFGDQVIGLKFINPDRYAAIQNVFPKLPGEEKKDKDAKLVNETA |
| | | DAIISTHEIRSLFLYHYLSKKPISAGDERRFIQVDTETFIKQYIDTIKLFFE |
| | | DIKSGELQPIADPPNYQKNEPLPYVRGDKEKTQEERAQYRERQKEIKE |
| | | RRKELNTLLQNRYGLSIQYIPSRLREYLLGYKKVPYEKLALQKLRAQR |
| | | KEVKKRIKDIEKMRTPRVGEQATWLAEDIVFLTPPKMHTPERKTTKHP |
| | | QKLNNDQFRIMQSSLAYFSVNKKAIKKFFQKETGIGLSNRETSHPFLY |
| | | RIDVGRCRGILDFYTGYLKYKMDWLDDAIKKVDNRKHGKKEAKKYE |
| | | KYLPSSIQHKTPLELDYTRLPVYLPRGLFKKAIVKALAAHADFQVEPE |
| | | EDNVIFCLDQLLDGDTQDFYNWQRYYRSALTEKETDNQLVLAHPYA |
| | | EQILGTIKTLEGKQKNNKLGNKAKQKIKDELIDLKRAKRRLLDREQYL |
| | | RAVQAEDRALWLMIQERQKQKAEHEEIAFDQLDLKNITKILTESIDAR |
| | | LRIPDTKVDITDKLPLRRYGDLRRVAKDRRLVNLASYYHVAGLSEIPY |
| | | DLVKKELEEYDRRRVAFFEHVYQFEKEVYDRYAAELRNENPKGESTY |
| | | FSHWEYVAVAVKHSADTHFNELFKEKVMQLRNKFEIHNEFPYFDWLL |
| | | PEVEKASAALYADRVFDVAEGYYQKMRKLMRQ |
| Flavobacterium | WP_ | MDNNITVEKTELGLGITYNHDKVEDKHYFGGFFNLAQNNIDLVAQEF |
| sp. 316 | 045968377 | KKRLLIQGKDSINIFANYFSDQCSITNLERGIKILAEYFPVVSYIDLDEK |
| | (SEQ | NKSKSIREHLILLLETINNLRNYYTHYYHKKIIIDGSLFPLLDTILLKVVL |
| | ID No. | EIKKKKLKEDKTKQLLKKGLEKEMTILFNLMKAEQKEKKIKGWNIDE |
| | 146) | NIKGAVLNRAFSHLLYNDELSDYRKSKYNTEDETLKDTLTESGILFLL |
| | | SFFLNKKEQEQLKANIKGYKGKIASIPDEEITLKNNSLRNMATHWTYS |
| | | HLTYKGLKHRIKTDHEKETLLVNMVDYLSKVPHEIYQNLSEQNKSLF |
| | | LEDINEYMRDNEENHDSSEASRVIHPVIRKRYENKFAYFAIRFLDEFAE |
| | | FPTLRFMVNVGNYIHDNRKKDIGGTSLITNRTIKQQINVFGNLTEIHKK |
| | | KNDYFEKEENKEKTLEWELFPNPSYHFQKENIPIFIDLEKSKETNDLAK |
| | | EYAKEKKKIFGSSRKKQQNTAKKNRETIINLVFDKYKTSDRKTVTFEQ |
| | | PTALLSFNELNSFLYAFLVENKTGKELEKIIIEKIANQYQILKNCSSTVD |
| | | KTNDNIPKSIKKIVNTTTDSFYFEGKKIDIEKLEKDITIEIEKTNEKLETI |
| | | KENEESAQNYKRNERNTQKRKLYRKYVFFTNEIGIEATWITNDILRFL |
| | | DNKENWKGYQHSELQKFISQYDNYKKEALGLLESEWNLESDAFFGQ |
| | | NLKRMFQSNSTFETFYKKYLDNRKNTLETYLSAIENLKTMTDVRPKV |
| | | LKKKWTELFRFFDKKIYLLSTIETKINELITKPINLSRGIFEEKPTFINGK |
| | | NPNKENNQHLFANWFIYAKKQTILQDFYNLPLEQPKAITNLKKHKYK |
| | | LERSINNLKIEDIYIKQMVDFLYQKLFEQSFIGSLQDLYTSKEKREIEKG |
| | | KAKNEQTPDESFIWKKQVEINTHNGRIIAKTKIKDIGKFKNLLTDNKIA |
| | | HLISYDDRIWDFSLNNDGDITKKLYSINTELESYETIRREKLLKQIQQFE |
| | | QFLLEQETEYSAERKHPEKFEKDCNPNFKKYIIEGVLNKIIPNHEIEEIEI |
| | | LKSKEDVFKINFSDILILNNDNIKKGYLLIMIRNKFAHNQLIDKNLFNFS |
| | | LQLYSKNENENFSEYLNKVCQNIIQEFKEKLK |
| Porphyromonas | WP_ | MTEQSERPYNGTYYTLEDKHFWAAFLNLARHNAYITLTHIDRQLAYS |
| gulae | 046201018 | KADITNDQDVLSFKALWKNFDNDLERKSRLRSLILKHFSFLEGAAYG |
| | (SEQ | KKLFESKSSGNKSSKNKELTKKEKEELQANALSLDNLKSILFDFLQKL |
| | ID No. | KDFRNYYSHYRHSESSELPLFDGNMLQRLYNVFDVSVQRVKRDHEH |
| | 147) | NDKVDPHRHFNHLVRKGKKDRYGHNDNPSFKHHFVDSEGMVTEAG |
| | | LLFFVSLFLEKRDAIWMQKKIRGFKGGTETYQQMTNEVFCRSRISLPK |
| | | LKLESLRTDDWMLLDMLNELVRCPKPLYDRLREKDRARFRVPVDILP |
| | | DEDDTDGGGEDPFKNTLVRHQDRFPYFALRYFDLKKVFTSLRFHIDL |
| | | GTYHFAIYKKMIGEQPEDRHLTRNLYGFGRIQDFAEEHRPEEWKRLV |
| | | RDLDYFETGDKPYISQTTPHYHIEKGKIGLRFMPEGQHLWPSPEVGTT |
| | | RTGRSKYAQDKRLTAEAFLSVHELMPMMFYYFLLREKYSEEVSAEK |
| | | VQGRIKRVIEDVYAIYDAFARDEINTLKELDACLADKGIRRGHLPKQM |
| | | TAILSQEHKDMEEKIRKKLQEMIADTDHRLDMLDRQTDRKIRIGRKNA |
| | | GLPKSGVIADWLVRDMMRFQPVAKDTSGKPLNNSKANSTEYRMLQR |
| | | ALALFGGEKKRLTPYFRQMNLTGGNNPHPFLHETRWESHTNILSFYRS |
| | | YLRARKAFLERIGRSDRMENRPFLLLKEPKTDRQTLVAGWKSEFHLP |
| | | RGIFTEAVRDCLIEMGYDEVGSYREVGFMAKAVPLYFERACEDRVQP |
| | | FYDSPFNVGNSLKPKKGRFLSKEERAEEWERGKERFRDLEAWSHSAA |
| | | RRIEDAFAGIEYASPGNKKKIEQLLRDLSLWEAFESKLKVRADKINLA |
| | | KLKKEILEAQEHPYHDFKSWQKFERELRLVKNQDIITWMMCRDLMEE |
| | | NKVEGLDTGTLYLKDIRPNVQEQGSLNVLNRVKPMRLPVVVYRADS |
| | | RGHVHKEEAPLATVYIEERDTKLLKQGNFKSFVKDRRLNGLFSFVDT |
| | | GGLAMEQYPISKLRVEYELAKYQTARVCVFELTLRLEESLLTRYPHLP |
| | | DESFRKMLESWSDPLLAKWPELHGKVRLLIAVRNAFSHNQYPMYDE |
| | | AVFSSIRKYDPSSPDAIEERMGLNIAHRLSEEVKQAKETVERIIQV |
| WP_ | Chryseo- | METQTIGHGIAYDHSKIQDKHFFGGFLNLAENNIKAVLKAFSEKFNVG |
| 047431796 | bacterium | NVDVKQFADVSLKDNLPDNDFQKRVSFLKMYFPVVDFINIPNNRAKF |
| | sp. | RSDLTTLFKSVDQLRNFYTHYYHKPLDFDASLFILLDDIFARTAKEVR |
| | YR477 | DQKMKDDKTRQLLSKSLSEELQKGYELQLERLKELNRLGKKVNIHDQ |
| | (SEQ | LGIKNGVLNNAFNHLIYKDGESFKTKLTYSSALTSFESAENGIEISQSG |
| | ID No. | LLFLLSMFLKRKEIEDLKNRNKGFKAKVVIDEDGKVNGLKFMATHW |
| | 148) | VFSYLCFKGLKSKLSTEFHEETLLIQIIDELSKVPDELYCAFDKETRDKF |
| | | IEDINEYVKEGHQDFSLEDAKVIHPVIRKRYENKFNYFAIRFLDEFVKF |
| | | PSLRFQVHVGNYVHDRRIKNIDGTTFETERVVKDRIKVFGRLSETSSYK |
| | | AQYLSSVSDKHDETGWEIFPNPSYVFINNNIPIHISVDTSFKKEIADFKK |
| | | LRRAQVPDELKIRGAEKKRKFEITQMIGSKSVLNQEEPIALLSLNEIPAL |
| | | LYEILINGKEPAEIERIIKDKLNERQDVIKNYNPENWLPASQISRRLRSN |
| | | KGERIINTDKLLQLVTKELLVTEQKLKIISDNREALKQKKEGKYIRKFI |
| | | FTNSELGREAIWLADDIKRFMPADVRKEWKGYQHSQLQQSLAFYNSR |
| | | PKEALAILESSWNLKDEKIIWNEWILKSFTQNKFFDAFYNEYLKGRKK |
| | | YFAFLSEHIVQYTSNAKNLQKFIKQQMPKDLFEKRHYIIEDLQTEKNKI |
| | | LSKPFIFPRGIFDKKPTFIKGVKVEDSPESFANWYQYGYQKDHQFQKF |
| | | YDWKRDYSDVFLEHLGKPFINNGDRRTLGMEELKERIIIKQDLKIKKI |
| | | KIQDLFLRLIAENLFQKVFKYSAKLPLSDFYLTQEERMEKENMAALQN |
| | | VREEGDKSPNIIKDNFIWSKMIPYKKGQIIENAVKLKDIGKLNVLSLDD |
| | | KVQTLLSYDDAKPWSKIALENEFSIGENSYEVIRREKLFKEIQQFESEIL |
| | | FRSGWDGINHPAQLEDNRNPKFKMYIVNGILRKSAGLYSQGEDIWFE |
| | | YNADFNNLDADVLETKSELVQLAFLVTAIRNKFAHNQLPAKEFYFYIR |
| | | AKYGFADEPSVALVYLNFTKYAINEFKKVMI |
| Riemerella | WP_ | MFFSFHNAQRVIFKHLYKAFDASLRMVKEDYKAHFTVNLTRDFAHL |
| anatipestifer | 049354263 | NRKGKNKQDNPDFNRYRFEKDGFFTESGLLFFTNLFLDKRDAYWML |
| | (SEQ | KKVSGFKASHKQREKMTTEVFCRSRILLPKLRLESRYDHNQMLLDML |
| | ID No. | SELSRCPKLLYEKLSEENKKHFQVEADGFLDEIEEEQNPFKDTLIRHQD |
| | 149) | RFPYFALRYLDLNESFKSIRFQVDLGTYHYCIYDKKIGDEQEKRHLTR |
| | | TLLSFGRLQDFTEINRPQEWKALTKDLDYKETSNQPFISKTTPHYHITD |
| | | NKIGFRLGTSKELYPSLEIKDGANRIAKYPYNSGFVAHAFISVHELLPL |
| | | MFYQHLTGKSEDLLKETVRHIQRIYKDFEEERINTIEDLEKANQGRLPL |
| | | GAFPKQMLGLLQNKQPDLSEKAKIKIEKLIAETKLLSHRLNTKLKSSP |
| | | KLGKRREKLIKTGVLADWLVKDFMRFQPVAYDAQNQPIKSSKANSTE |
| | | FWFIRRALALYGGEKNRLEGYFKQTNLIGNTNPHPFLNKFNWKACRN |
| | | LVDFYQQYLEQREKFLEAIKNQPWEPYQYCLLLKIPKENRKNLVKGW |
| | | EQGGISLPRGLFTEAIRETLSEDLMLSKPIRKEIKKHGRVGFISRAITLYF |
| | | KEKYQDKHQSFYNLSYKLEAKAPLLKREEHYEYWQQNKPQSPTESQ |
| | | RLELHTSDRWKDYLLYKRWQHLEKKLRLYRNQDVMLWLMTLELTK |
| | | NHFKELNLNYHQLKLENLAVNVQEADAKLNPLNQTLPMVLPVKVYP |
| | | ATAFGEVQYHKTPIRTVYIREEHTKALKMGNFKALVKDRRLNGLFSFI |
| | | KEENDTQKHPISQLRLRRELEIYQSLRVDAFKETLSLEEKLLNKHTSLS |
| | | SLENEFRALLEEWKKEYAASSMVTDEHIAFIASVRNAFCHNQYPFYKE |
| | | ALHAPIPLFTVAQPTTEEKDGLGIAEALLKVLREYCEIVKSQI |
| Porphyromonas | WP_ | MTEQNEKPYNGTYYTLEDKHFWAAFFNLARHNAYITLAHIDRQLAYS |
| gingivalis | 052912312 | KADITNDEDILFFKGQWKNLDNDLERKARLRSLILKHFSFLEGAAYGK |
| | (SEQ | KLFESQSSGNKSSKKKELTKKEKEELQANALSLDNLKSILFDFLQKLK |
| | ID No. | DFRNYYSHYRHPESSELPLFDGNMLQRLYNVFDVSVQRVKRDHEHN |
| | 150) | DKVDPHRHFNHLVRKGKKDKYGNNDNPFFKHHFVDREEKVTEAGLL |
| | | FFVSLFLEKRDAIWMQKKIRGFKGGTEAYQQMTNEVFCRSRISLPKLK |
| | | LESLRTDDWMLLDMLNELVRCPKLLYDRLREEDRARFRVPVDILSDE |
| | | DDTDGTEEDPFKNTLVRHQDRFPYFALRYFDLKKVFTSLRFHIDLGTY |
| | | HFAIYKKNIGEQPEDRHLTRNLYGFGRIQDFAEEHRPEEWKRLVRDLD |
| | | YFETGDKPYITQTTPHYHIEKGKIGLRFVPEGQLLWPSPEVGATRTGRS |
| | | KYAQDKRFTAEAFLSVHELMPMMFYYFLLREKYSEEASAEKVQGRIK |
| | | RVIEDVYAVYDAFARDEINTRDELDACLADKGIRRGHLPRQMIAILSQ |
| | | EHKDMEEKVRKKLQEMIADTDHRLDMLDRQTDRKIRIGRKNAGLPK |
| | | SGVIADWLVRDMMRFQPVAKDTSGKPLNNSKANSTEYRMLQRALAL |
| | | FGGEKERLTPYFRQMNLTGGNNPHPFLHETRWESHTNILSFYRSYLKA |
| | | RKAFLQSIGRSDREENHRFLLLKEPKTDRQTLVAGWKSEFHLPRGIFT |
| | | EAVRDCLIEMGYDEVGSYKEVGFMAKAVPLYFERACKDRVQPFYDY |
| | | PFNVGNSLKPKKGRFLSKEKRAEEWESGKERFRDLEAWSHSAARRIE |
| | | DAFVGIEYASWENKKKIEQLLQDLSLWETFESKLKVKADKINIAKLKK |
| | | EILEAKEHPYHDFKSWQKFERELRLVKNQDIITWMMCRDLMEENKVE |
| | | GLDTGTLYLKDIRTDVQEQGSLNVLNHVKPMRLPVVVYRADSRGHV |
| | | HKEEAPLATVYIEERDTKLLKQGNFKSFVKDRRLNGLFSFVDTGALA |
| | | MEQYPISKLRVEYELAKYQTARVCAFEQTLELEESLLTRYPHLPDESF |
| | | REMLESWSDPLLDKWPDLQREVRLLIAVRNAFSHNQYPMYDETIFSSI |
| | | RKYDPSSLDAIEERMGLNIAHRLSEEVKLAKEMVERIIQA |
| Porphyromonas | WP_ | MTEQNEKPYNGTYYTLKDKHFWAAFFNLARHNAYITLTHIDRQLAYS |
| gingivalis | 058019250 | KADITNDEDILFFKGQWKNLDNDLERKARLRSLILKHFSFLEGAAYGK |
| | (SEQ | KLFESQSSGNKSSKKKELTKKEKEELQANALSLDNLKSILFDFLQKLK |
| | ID No. | DFRNYYSHYRHPESSELPMFDGNMLQRLYNVFDVSVQRVKRDHEHN |
| | 151) | DKVDPHRHFNHLVRKGKKDRCGNNDNPFFKHHFVDREGKVTEAGLL |
| | | FFVSLFLEKRDAIWMQKKIRGFKGGTETYQQMTNEVFCRSRISLPKLK |
| | | LESLRTDDWMLLDMLNELVRCPKSLYDRLREEDRACFRVPVDILSDE |
| | | DDTDGAEEDPFKNTLVRHQDRFPYFALRYFDLKKVFTSLRFHIDLGTY |
| | | HFAIYKKNIGEQPEDRHLTRNLYGFGRIQDFAEEHRPEEWKRLVRDLD |
| | | CFETGDKPYITQTTPHYHIEKGKIGLRFVPEGQHLWPSPEVGATRTGRS |
| | | KYAQDKRFTAEAFLSVHELMPMMFYYFLLREKYSEEVSAERVQGRIK |
| | | RVIEDVYAVYDAFARDEINTRDELDACLADKGIRRGHLPRQMIAILSQ |
| | | KHKDMEEKVRKKLQEMIADTDHRLDMLDRQTDRKIRIGRKNAGLPK |
| | | SGVIADWLVRDMMRFQPVAKDTSGKPLNNSKANSTEYRMLQRALAL |
| | | FGGEKERLTPYFRQMNLTGGNNPHPFLHETRWESHTNILSFYRSYLKA |
| | | RKAFLQSIGRSDRVENHRFLLLKEPKTDRQTLVAGWKGEFHLPRGIFT |
| | | EAVRDCLIEMGLDEVGSYKEVGFMAKAVPLYFERACKDRVQPFYDY |
| | | PFNVGNSLKPKKGRFLSKEKRAEEWESGKERFRDLEAWSHSAARRIE |
| | | DAFAGIENASRENKKKIEQLLQDLSLWETFESKLKVKADKINIAKLKK |
| | | EILEAKEHPYLDFKSWQKFERELRLVKNQDIITWMMCRDLMEENKVE |
| | | GLDTGTLYLKDIRTDVQEQGSLNVLNHVKPMRLPVVVYRADSRGHV |
| | | HKEQAPLATVYIEERDTKLLKQGNFKSFVKDRRLNGLFSFVDTGALA |
| | | MEQYPISKLRVEYELAKYQTARVCAFEQTLELEESLLTRYPHLPDENF |
| | | RKMLESWSDPLLDKWPDLHRKVRLLIAVRNAFSHNQYPMYDEAVFS |
| | | SIRKYDPSSPDAIEERMGLNIAHRLSEEVKQAKEMAERIIQA |
| Flavo- | WP_ | MSSKNESYNKQKTFNHYKQEDKYFFGGFLNNADDNLRQVGKEFKTR |
| bacterium | 060381855 | INFNHNNNELASVFKDYFNKEKSVAKREHALNLLSNYFPVLERIQKHT |
| columnare | (SEQ | NHNFEQTREIFELLLDTIKKLRDYYTHHYHKPITINPKVYDFLDDTLLD |
| | ID No. | VLITIKKKKVKNDTSRELLKEKFRPELTQLKNQKREELIKKGKKLLEE |
| | 152) | NLENAVFNHCLRPFLEENKTDDKQNKTVSLRKYRKSKPNEETSITLTQ |
| | | SGLVFLISFFLHRKEFQVFTSGLEGFKAKVNTIKEEEISLNKNNIVYMIT |
| | | HWSYSYYNFKGLKHRIKTDQGVSTLEQNNTTHSLTNTNTKEALLTQI |
| | | VDYLSKVPNEIYETLSEKQQKEFEEDINEYMRENPENEDSTFSSIVSHK |
| | | VIRKRYENKFNYFAMRFLDEYAELPTLRFMVNFGDYIKDRQKKILESI |
| | | QFDSERIIKKEIHLFEKLGLVTEYKKNVYLKETSNIDLSRFPLFPSPSYV |
| | | MANNNIPFYIDSRSNNLDEYLNQKKKAQSQNRKRNLTFEKYNKEQSK |
| | | DAIIAMLQKEIGVKDLQQRSTIGLLSCNELPSMLYEVIVKDIKGAELEN |
| | | KIAQKIREQYQSIRDFTLDSPQKDNIPTTLTKTISTDTSVTFENQPIDIPR |
| | | LKNALQKELTLTQEKLLNVKQHEIEVDNYNRNKNTYKFKNQPKDKV |
| | | DDNKLQRKYVFYRNEIGQEANWLASDLIHFMKNKSLWKGYMHNEL |
| | | QSFLAFFEDKKNDCIALLETVFNLKEDCILTKDLKNLFLKHGNFIDFYK |
| | | EYLKLKEDFLNTESTFLENGFIGLPPKILKKELSKRLNYIFIVFQKRQFII |
| | | KELEEKKNNLYADAINLSRGIFDEKPTMIPFKKPNPDEFASWFVASYQ |
| | | YNNYQSFYELTPDKIENDKKKKYKNLRAINKVKIQDYYLKLMVDTLY |
| | | QDLFNQPLDKSLSDFYVSKTDREKIKADAKAYQKRNDSFLWNKVIHL |
| | | SLQNNRITANPKLKDIGKYKRALQDEKIATLLTYDDRTWTYALQKPE |
| | | KENENDYKELHYTALNMELQEYEKVRSKKLLKQVQELEKQILDKFY |
| | | DFSNNATHPEDLEIEDKKGKRHPNFKLYITKALLKNESEIINLENIDIEIL |
| | | IKYYDYNTEKLKEKIKNMDEDEKAKIVNTKENYNKITNVLIKKALVLI |
| | | IIRNKMAHNQYPPKFIYDLATRFVPKKEEEYFACYFNRVFETITTELWE |
| | | NKKKAKEIV |
| Porphyromonas | WP_ | MTEQNERPYNGTYYTLEDKHFWAAFFNLARHNAYITLTHIDRQLAYS |
| gingivalis | 061156470 | KADITNDEDILFFKGQWKNLDNDLERKARLRSLILKHFSFLEGAAYGK |
| | (SEQ | KLFENKSSGNKSSKKKELTKKEKEELQANALSLDNLKSILFDFLQKLK |
| | ID No. | DFRNYYSHYRHPESSELPLFDGNMLQRLYNVFDVSVQRVKRDHEHN |
| | 153) | DKVDPHRHFNHLVRKGKKDRCGNNDNPFFKHHFVDREGKVTEAGLL |
| | | FFVSLFLEKRDAIWMQKKIRGFKGGTEAYQQMTNEVFCRSRISLPKLK |
| | | LESLRTDDWMLLDMLNELVRCPKSLYDRLREEDRARFRVPVDILSDE |
| | | DDTDGTEEDPFKNTLVRHQDRFPYFALRYFDLKKVFTSLRFHIDLGTY |
| | | HFAIYKKNIGEQPEDRHLTRNLYGFGRIQDFAEEHRPEEWKRLVRDLD |
| | | YFETGDKPYITQTTPHYHIEKGKIGLRFVPEGQHLWPSPEVGATRTGR |
| | | SKYAQDKRLTAEAFLSVHELMPMMFYYFLLREKYSEEVSAEKVQGRI |
| | | KRVIEDVYAVYDAFARGEIDTLDRLDACLADKGIRRGHLPRQMIAILS |
| | | QEHKDMEEKVRKKLQEMIADTDHRLDMLDRQTDRKIRIGRKNAGLP |
| | | KSGVIADWLVRDMMRFQPVAKDTSGKPLNNSKANSTEYRMLQRALA |
| | | LFGGEKERLTPYFRQMNLTGGNNPHPFLHETRWESHTNILSFYRSYLK |
| | | ARKAFLQSIGRSDREENHRFLLLKEPKTDRQTLVAGWKSEFHLPRGIF |
| | | TEAVRDCLIEMGYDEVGSYKEVGFMAKAVPLYFERACKDRVQPFYD |
| | | YPFNVGNSLKPKKGRFLSKEKRAEEWESGKERFRLAKLKKEILEAKE |
| | | HPYLDFKSWQKFERELRLVKNQDIITWMMCRDLMEENKVEGLDTGT |
| | | LYLKDIRTEVQEQGSLNVLNRVKPMRLPVVVYRADSRGHVHKEQAP |
| | | LATVYIEERDTKLLKQGNFKSFVKDRRLNGLFSFVDTGGLAMEQYPIS |
| | | KLRVEYELAKYQTARVCAFEQTLELEESLLTRCPHLPDKNFRKMLES |
| | | WSDPLLDKWPDLQREVWLLIAVRNAFSHNQYPMYDEAVFSSIRKYDP |
| | | SSPDAIEERMGLNIAHRLSEEVKQAKEMAERIIQA |
| Porphyromonas | WP_ | MNTVPASENKGQSRTVEDDPQYFGLYLNLARENLIEVESHVRIKFGK |
| gingivalis | 061156637 | KKLNEESLKQSLLCDHLLSVDRWTKVYGHSRRYLPFLHYFDPDSQIE |
| | (SEQ | KDHDSKTGVDPDSAQRLIRELYSLLDFLRNDFSHNRLDGTTFEHLEVS |
| | ID No. | PDISSFITGTYSLACGRAQSRFADFFKPDDFVLAKNRKEQLISVADGKE |
| | 154) | CLTVSGLAFFICLFLDREQASGMLSRIRGFKRTDENWARAVHETFCDL |
| | | CIRHPHDRLESSNTKEALLLDMLNELNRCPRILYDMLPEEERAQFLPA |
| | | LDENSMNNLSENSLNEESRLLWDGSSDWAEALTKRIRHQDRFPYLML |
| | | RFIEEMDLLKGIRFRVDLGEIELDSYSKKVGRNGEYDRTITDHALAFG |
| | | KLSDFQNEEEVSRMISGEASYPVRFSLFAPRYAIYDNKIGYCHTSDPVY |
| | | PKSKTGEKRALSNPQSMGFISVHDLRKLLLMELLCEGSFSRMQSGFLR |
| | | KANRILDETAEGKLQFSALFPEMRHRFIPPQNPKSKDRREKAETTLEK |
| | | YKQEIKGRKDKLNSQLLSAFDMNQRQLPSRLLDEWMNIRPASHSVKL |
| | | RTYVKQLNEDCRLRLRKFRKDGDGKARAIPLVGEMATFLSQDIVRMII |
| | | SEETKKLITSAYYNEMQRSLAQYAGEENRRQFRAIVAELHLLDPSSGH |
| | | PFLSATMETAHRYTEDFYKCYLEKKREWLAKTFYRPEQDENTKRRIS |
| | | VFFVPDGEARKLLPLLIRRRMKEQNDLQDWIRNKQAHPIDLPSHLFDS |
| | | KIMELLKVKDGKKKWNEAFKDWWSTKYPDGMQPFYGLRRELNIHG |
| | | KSVSYIPSDGKKFADCYTHLMEKTVQDKKRELRTAGKPVPPDLAADI |
| | | KRSFHRAVNEREFMLRLVQEDDRLMLMAINKMMTDREEDILPGLKNI |
| | | DSILDKENQFSLAVHAKVLEKEGEGGDNSLSLVPATIEIKSKRKDWSK |
| | | YIRYRYDRRVPGLMSHFPEHKATLDEVKTLLGEYDRCRIKIFDWAFAL |
| | | EGAIMSDRDLKPYLHESSSREGKSGEHSTLVKMLVEKKGCLTPDESQ |
| | | YLILIRNKAAHNQFPCAAEMPLIYRDVSAKVGSIEGSSAKDLPEGSSLV |
| | | DSLWKKYEMIIRKILPILDPENRFFGKLLNNMSQPINDL |
| Riemerella | WP_ | MFFSFHNAQRVIFKHLYKAFDASLRMVKEDYKAHFTVNLTRDFAHL |
| anatipestifer | 061710138 | NRKGKNKQDNPDFNRYRFEKDGFFTESGLLFFTNLFLDKRDAYWML |
| | (SEQ | KKVSGFKASHKQSEKMTTEVFCRSRILLPKLRLESRYDHNQMLLDML |
| | ID No. | SELSRCPKLLYEKLSEKDKKCFQVEADGFLDEIEEEQNPFKDTLIRHQD |
| | 155) | RFPYFALRYLDLNESFKSIRFQVDLGTYHYCIYDKKIGYEQEKRHLTR |
| | | TLLNFGRLQDFTEINRPQEWKALTKDLDYNETSNQPFISKTTPHYHITD |
| | | NKIGFRLRTSKELYPSLEVKDGANRIAKYPYNSDFVAHAFISISVHELL |
| | | PLMFYQHLTGKSEDLLKETVRHIQRIYKDFEEERINTIEDLEKANQGRL |
| | | PLGAFPKQMLGLLQNKQPDLSEKAKIKIEKLIAETKLLSHRLNTKLKSS |
| | | PKLGKRREKLIKTGVLADWLVKDFMRFQPVVYDAQNQPIKSSKANST |
| | | ESRLIRRALALYGGEKNRLEGYFKQTNLIGNTNPHPFLNKFNWKACR |
| | | NLVDFYQQYLEQREKFLEAIKHQPWEPYQYCLLLKVPKENRKNLVK |
| | | GWEQGGISLPRGLFTEAIRETLSKDLTLSKPIRKEIKKHGRVGFISRAIT |
| | | LYFKEKYQDKHQSFYNLSYKLEAKAPLLKKEEHYEYWQQNKPQSPT |
| | | ESQRLELHTSDRWKDYLLYKRWQHLEKKLRLYRNQDIMLWLMTLEL |
| | | TKNHFKELNLNYHQLKLENLAVNVQEADAKLNPLNQTLPMVLPVKV |
| | | YPTTAFGEVQYHETPIRTVYIREEQTKALKMGNFKALVKDRHLNGLF |
| | | SFIKEENDTQKHPISQLRLRRELEIYQSLRVDAFKETLSLEEKLLNKHA |
| | | SLSSLENEFRTLLEEWKKKYAASSMVTDKHIAFIASVRNAFCHNQYPF |
| | | YKETLHAPILLFTVAQPTTEEKDGLGIAEALLRVLREYCEIVKSQI |
| Flavo- | WP_ | MSSKNESYNKQKTFNHYKQEDKYFFGGFLNNADDNLRQVGKEFKTR |
| bacterium | 063744070 | INFNHNNNELASVFKDYFNKEKSVAKREHALNLLSNYFPVLERIQKHT |
| columnare | (SEQ | NHNFEQTREIFELLLDTIKKLRDYYTHHYHKPITINPKIYDFLDDTLLD |
| | ID No. | VLITIKKKKVKNDTSRELLKEKLRPELTQLKNQKREELIKKGKKLLEE |
| | 156) | NLENAVFNHCLRPFLEENKTDDKQNKTVSLRKYRKSKPNEETSITLTQ |
| | | SGLVFLMSFFLHRKEFQVFTSGLEGFKAKVNTIKEEKISLNKNNIVYMI |
| | | THWSYSYYNFKGLKHRIKTDQGVSTLEQNNTTHSLTNTNTKEALLTQ |
| | | IVDYLSKVPNEIYETLSEKQQKEFEEDINEYMRENPENEDSTFSSIVSH |
| | | KVIRKRYENKFNYFAMRFLDEYAELPTLRFMVNFGDYIKDRQKKILES |
| | | IQFDSERIIKKEIHLFEKLGLVTEYKKNVYLKETSNIDLSRFPLFPSPSYV |
| | | MANNNIPFYIDSRSNNLDEYLNQKKKAQSQNRKRNLTFEKYNKEQSK |
| | | DAIIAMLQKEIGVKDLQQRSTIGLLSCNELPSMLYEVIVKDIKGAELEN |
| | | KIAQKIREQYQSIRDFTLNSPQKDNIPTTLIKTISTDTSVTFENQPIDIPRL |
| | | KNAIQKELALTQEKLLNVKQHEIEVNNYNRNKNTYKFKNQPKDKVD |
| | | DNKLQRKYVFYRNEIGQEANWLASDLIHFMKNKSLWKGYMHNELQS |
| | | FLAFFEDKKNDCIALLETVFNLKEDCILTKDLKNLFLKHGNFIDFYKEY |
| | | LKLKEDFLNTESTFLENGFIGLPPKILKKELSKRLNYIFIVFQKRQFIIKE |
| | | LEEKKNNLYADAINLSRGIFDEKPTMIPFKKPNPDEFASWFVASYQYN |
| | | NYQSFYELTPDKIENDKKKKYKNLRAINKVKIQDYYLKLMVDTLYQD |
| | | LFNQPLDKSLSDFYVSKTDREKIKADAKAYQKRNDSFLWNKVIHLSL |
| | | QNNRITANPKLKDIGKYKRALQDEKIATLLTYDDRTWTYALQKPEKE |
| | | NENDYKELHYTALNMELQEYEKVRSKKLLKQVQELEKQILDKFYDFS |
| | | NNATHPEDLEIEDKKGKRHPNFKLYITKALLKNESEIINLENIDIEILIKY |
| | | YDYNTEKLKEKIKNMDEDEKAKIVNTKENYNKITNVLIKKALVLIIIR |
| | | NKMAHNQYPPKFIYDLATRFVPKKEEEYFACYFNRVFETITTELWEN |
| | | KKKAKEIV |
| Riemerella | WP_ | MEKPLPPNVYTLKHKFFWGAFLNIARHNAFITICHINEQLGLTTPPNDD |
| anatipestifer | 064970887 | KIADVVCGTWNNILNNDHDLLKKSQLTELILKHFPFLAAMCYHPPKK |
| | (SEQ | EGKKKGSQKEQQKEKENEAQSQAEALNPSELIKVLKTLVKQLRTLRN |
| | ID No. | YYSHEISHKKPDAEKDIFKHLYKAFDASLRMVKEDYKAHFTVNLTQD |
| | 157) | FAHLNRKGKNKQDNPDFDRYRFEKDGFFTESGLLFFTNLFLDKRDAY |
| | | WMLKKVSGFKASHKQSEKMTTEVFCRSRILLPKLRLESRYDHNQMLL |
| | | DMLSELSRYPKLLYEKLSEEDKKRFQVEADGFLDEIEEEQNPFKDTLIR |
| | | HQDRFPYFALRYLDLNESFKSIRFQVDLGTYHYCIYDKKIGDEQEKRH |
| | | LTRTLLSFGRLQDFTEINRPQEWKALTKDLDYKETSKQPFISKTTPHYH |
| | | ITDNKIGFRLGTSKELYPSLEVKDGANRIAQYPYNSDFVAHAFISVHEL |
| | | LPLMFYQHLTGKSEDLLKETVRHIQRIYKDFEEERINTIEDLEKANQGR |
| | | LPLGAFPKQMLGLLQNKQPDLSEKAKIKIEKLIAETKLLSHRLNTKLKS |
| | | SPKLGKRREKLIKTGVLADWLVKDFMRFQPVAYDAQNQPIESSKANS |
| | | TEFQLIQRALALYGGEKNRLEGYFKQTNLIGNTNPHPFLNKFNWKAC |
| | | RNLVDFYQQYLEQREKFLEAIKNQPWEPYQYCLLLKIPKENRKNLVK |
| | | GWEQGGISLPRGLFTEAIRETLSKDLTLSKPIRKEIKKHGRVGFISRAIT |
| | | LYFREKYQDDHQSFYDLPYKLEAKASPLPKKEHYEYWQQNKPQSPTE |
| | | LQRLELHTSDRWKDYLLYKRWQHLEKKLRLYRNQDVMLWLMTLEL |
| | | TKNHFKELNLNYHQLKLENLAVNVQEADAKLNPLNQTLPMVLPVKV |
| | | YPATAFGEVQYQETPIRTVYIREEQTKALKMGNFKALVKDRRLNGLF |
| | | SFIKEENDTQKHPISQLRLRRELEIYQSLRVDAFKETLNLEEKLLKKHT |
| | | SLSSVENKFRILLEEWKKEYAASSMVTDEHIAFIASVRNAFCHNQYPF |
| | | YEEALHAPIPLFTVAQQTTEEKDGLGIAEALLRVLREYCEIVKSQI |
| Sinomicrobium | WP_ | MESTTTLGLHLKYQHDLFEDKHYFGGGVNLAVQNIESIFQAFAERYGI |
| oceani | 072319476.1 | QNPLRKNGVPAINNIFHDNISISNYKEYLKFLKQYLPVVGFLEKSNEINI |
| | (SEQ | FEFREDFEILINAIYKLRHFYTHYYHSPIKLEDRFYTCLNELFVAVAIQV |
| | ID No. | KKHKMKSDKTRQLLNKNLHQLLQQLIEQKREKLKDKKAEGEKVSLD |
| | 158) | TKSIENAVLNDAFVHLLDKDENIRLNYSSRLSEDIITKNGITLSISGLLFL |
| | | LSLFLQRKEAEDLRSRIEGFKGKGNELRFMATHWVFSYLNVKRIKHR |
| | | LNTDFQKETLLIQIADELSKVPDEVYKTLDHENRSKFLEDINEYIREGN |
| | | EDASLNESTVVHGVIRKRYENKFHYLVLRYLDEFVDFPSLRFQVHLG |
| | | NYIHDRRDKVIDGTNFITNRVIKEPIKVFGKLSHVSKLKSDYMESLSRE |
| | | HKNGWDVFPNPSYNFVGHNIPIFINLRSASSKGKELYRDLMKIKSEKK |
| | | KKSREEGIPMERRDGKPTKIEISNQIDRNIKDNNFKDIYPGEPLAMLSL |
| | | NELPALLFELLRRPSITPQDIEDRMVEKLYERFQIIRDYKPGDGLSTSKI |
| | | SKKLRKADNSTRLDGKKLLRAIQTETRNAREKLHTLEENKALQKNRK |
| | | RRTVYTTREQGREASWLAQDLKRFMPIASRKEWRGYHHSQLQQILAF |
| | | YDQNPKQPLELLEQFWDLKEDTYVWNSWIHKSLSQHNGFVPMYEGY |
| | | LKGRLGYYKKLESDIIGFLEEHKVLKRYYTQQHLNVIFRERLYFIKTET |
| | | KQKLELLARPLVFPRGIFDDKPTFVQDKKVVDHPELFADWYVYSYKD |
| | | DHSFQEFYHYKRDYNEIFETELSWDIDFKDNKRQLNPSEQMDLFRMK |
| | | WDLKIKKIKIQDIFLKIVAEDIYLKIFGHKIPLSLSDFYISRQERLTLDEQ |
| | | AVAQSMRLPGDTSENQIKESNLWQTTVPYEKEQIREPKIKLKDIGKFK |
| | | YFLQQQKVLNLLKYDPQHVWTKAELEEELYIGKHSYEVVRREMLLQ |
| | | KCHQLEKHILEQFRFDGSNHPRELEQGNHPNFKMYIVNGILTKRGELE |
| | | IEAENWWLELGNSKNSLDKVEVELLTMKTIPEQKAFLLILIRNKFAHN |
| | | QLPADNYFHYASNLMNLKKSDTYSLFWFTVADTIVQEFMSL |
| Reichen- | WP_ | MKTNPLIASSGEKPNYKKFNTESDKSFKKIFQNKGSIAPIAEKACKNFE |
| bachiella | 073124441.1 | IKSKSPVNRDGRLHYFSVGHAFKNIDSKNVFRYELDESQMDMKPTQF |
| agariperforans | (SEQ | LALQKEFFDFQGALNGLLKHIRNVNSHYVHTFEKLEIQSINQKLITFLIE |
| | ID No. | AFELAVIHSYLNEEELSYEAYKDDPQSGQKLVQFLCDKFYPNKEHEV |
| | 159) | EERKTILAKNKRQALEHLLFIEVTSDIDWKLFEKHKVFTISNGKYLSFH |
| | | ACLFLLSLFLYKSEANQLISKIKGFKRNDDNQYRSKRQIFTFFSKKFTS |
| | | QDVNSEEQHLVKFRDVIQYLNHYPSAWNKHLELKSGYPQMTDKLMR |
| | | YIVEAEIYRSFPDQTDNHRFLLFAIREFFGQSCLDTWTGNTPINFSNQE |
| | | QKGFSYEINTSAEIKDIETKLKALVLKGPLNFKEKKEQNRLEKDLRRE |
| | | KKEQPTNRVKEKLLTRIQHNMLYVSYGRNQDRFMDFAARFLAETDY |
| | | FGKDAKFKMYQFYTSDEQRDHLKEQKKELPKKEFEKLKYHQSKLVD |
| | | YFTYAEQQARYPDWDTPFVVENNAIQIKVTLFNGAKKIVSVQRNLML |
| | | YLLEDALYSEKRENAGKGLISGYFVHHQKELKDQLDILEKETEISREQ |
| | | KREFKKLLPKRLLHRYSPAQINDTTEWNPMEVILEEAKAQEQRYQLL |
| | | LEKAILHQTEEDFLKRNKGKQFKLRFVRKAWHLMYLKELYMNKVAE |
| | | HGHHKSFHITKEEFNDFCRWMFAFDEVPKYKEYLCDYFSQKGFFNNA |
| | | EFKDLIESSTSLNDLYEKTKQRFEGWSKDLTKQSDENKYLLANYESM |
| | | LKDDMLYVNISHFISYLESKGKINRNAHGHIAYKALNNVPHLIEEYYY |
| | | KDRLAPEEYKSHGKLYNKLKTVKLEDALLYEMAMHYLSLEPALVPK |
| | | VKTKVKDILSSNIAFDIKDAAGHHLYHLLIPFHKIDSFVALINHQSQQE |
| | | KDPDKTSFLAKIQPYLEKVKNSKDLKAVYHYYKDTPHTLRYEDLNMI |
| | | HSHIVSQSVQFTKVALKLEEYFIAKKSITLQIARQISYSEIADLSNYFTD |
| | | EVRNTAFHFDVPETAYSMILQGIESEFLDREIKPQKPKSLSELSTQQVS |
| | | VCTAFLETLHNNLFDRKDDKKERLSKARERYFEQIN |

Table of Direct Repeats

| | Cas13c ortholog | DR |
|---|---|---|
| C-1 | Fusobacterium necrophorum | GACTAAATCCAAGTA |
| | subsp. funduliforme | GATTGGAATTTTAAC |
| | ATCC 51357 contig00003 | |
| | (SEQ ID No. 160) | |
| C-2 | Fusobacterium necrophorum | GACTAAATCCAAGTA |
| | DJ-2 contig0065, whole | GATTGGAATTTTAAC |
| | genome shotgun sequence | |
| | (SEQ ID No. 161) | |
| C-3 | Fusobacterium necrophorum | GACTAAATCCAAGTA |
| | BFTR-1 contig0068 | GATTGGAATTTTAAC |
| | (SEQ ID No. 162) | |
| C-4 | Fusobacterium necrophorum | GTTAAAATTCCAATC |
| | subsp. funduliforme 1_1_36S | TACTTGGATTTAGTC |
| | cont1.14 | |
| | (SEQ ID No. 163) | |
| C-5 | Fusobacterium perfoetens | GACTAAAACCAAGTA |
| | ATCC 29250 | AATTGGTATTTAAAC |
| | T364DRAFT_scaffold00009.9_C | |
| | (SEQ ID No. 164) | |
| C-6 | Fusobacterium ulcerans | GACTAAATCCATGTA |
| | ATCC 49185 cont2.38 | AGTGGAATTTAAA |
| | (SEQ ID No. 165) | |
| C-7 | Anaerosalibacter sp. ND1 | GGACTATACTCACTA |
| | genome assembly | AGGTGAGAATAAAAC |
| | Anaerosalibacter | |
| | massiliensis ND1 | |
| | (SEQ ID No. 166) | |

Table of Cas13c Orthologs

| | |
|---|---|
| Anaerosalibacter | MKSGRREKAKSNKSSIVRVIISNFDDKQVKIKVLYTKQGGIDVIKFKSTKD |
| massiliensis | EKGRMKFNFDCAYNRLEEEEFNSFGGKGKQSFFVTTNEDLTELHVTKRHK |
| WP_042678931.1 | TTGEIIKDYTIQGKYTPIKQDRTKVTVITDNKDHFDSNDLGDKIRLSRSLTQ |
| (SEQ ID No. 167) | YTNRILLDADVMKNYREIVCSDSEKVDETINIDSQEIYKINRFLSYRSNMIIY |
| | YQMINNFLLHYDGEEDKGGNDSINLINEIWKYENKKNDEKEKIIERSYKSI |
| | EKSINQYILNHNTEVESGDKEKKIDISEERIKEDLKKTFILFSRLRHYMVHY |
| | NYKFYENLYSGKNFIIYNKDKSKSRRFSELLDLNIFKELSKIKLVKNAVSNY |
| | LDKKTTIHVLNKNINAIKLLDIYRDICETKNGFNNFINNMMTISGEDKEYKE |
| | MVTKHFNENMNKLSIYLENFKKHSDFKTNNKKKETYNLLKQELDEQKKL |
| | RLWFNAPYVYDIHSSKKYKELYVERKKYVDIHSKLIEAGINNDNKKKLNE |
| | INVKLCELNTEMKEMTKLNSKYRLQYKLQLAFGFILEEFNLDIDKFVSAFD |
| | KDNNLTISKFMEKRETYLSKSLDRRDNRFKKLIKDYKFRDTEDIFCSDREN |
| | NLVKLYILMYILLPVEIRGDFLGFVKKNYYDLKHVDFIDKRNNDNKDTFF |
| | HDLRLFEKNVKRLEVTSYSLSDGFLGKKSREKFGKELEKFIYKNVSIALPT |
| | NIDIKEFNKSLVLPMMKNYQIIFKLLNDIEISALFLIAKKEGNEGSITFKKVI |
| | DKVRKEDMNGNINFSQVMKMALNEKVNCQIRNSIAHINMKQLYIEPLNIY |
| | INNNQNKKTISEQMEEIIDICITKGLTGKELNKNIINDYYMKKEKLVFNLKL |
| | RKRNNLVSIDAQQKNMKEKSILNKYDLNYKDENLNIKEIILKVNDLNNKQ |
| | KLLKETTEGESNYKNALSKDILLLNGIIRKNINFKIKEMILGIIQQNEYRYVN |
| | INIYDKIRKEDHNIDLKINNKYIEISCYENKSNESTDERINFKIKYMDLKVKN |
| | ELLVPSCYEDIYIKKKIDLEIRYIENCKVVYIDIYYKKYNINLEFDGKTLFVK |
| | FNKDVKKNNQKVNLESNYIQNIKFIVS |
| Cetobacterium sp. | MEEIKHKKNKSSIIRVIVSNYDMTGIKEIKVLYQKQGGVDTFNLKTIINLES |
| ZOR0034 | GNLEIISCKPKEREKYRYEFNCKTEINTISITKKDKVLKKEIRKYSLELYFKN |
| WP_047396607.1 | EKKDTVVAKVTDLLKAPDKIEGERNHLRKLSSSTERKLLSKTLCKNYSEIS |
| (SEQ ID No. 168) | TPIEEIDSIKIYKIKRFLNYRSNFLIYFALINDFLCAGVKEDDINEVWLIQD |
| | KEHTAFLENRIEKITDYIFDKLSKDIENKKNQFEKRIKKYKTSLEELKTETL |
| | EKNKTFYIDSIKTKITNLENKITELSLYNSKESLKEDLIKIISIFTNLRHSLMH |
| | YDYKSFENLFENIENEELKNLLDLNLFKSIRMSDEFKTKNRTNYLDGTESF |
| | TIVKKHQNLKKLYTYYNNLCDKKNGFNTFINSFFVTDGIENTDFKNLIILHF |
| | EKEMEEYKKSIEYYKIKISNEKNKSKKEKLKEKIDLLQSELINMREHKNLL |
| | KQIYFFDIHNSIKYKELYSERKNLIEQYNLQINGVKDVTAINHINTKLLSLK |
| | NKMDKITKQNSLYRLKYKLKIAYSFLMIEFDGDVSKFKNNFDPTNLEKRV |
| | EYLDKKEEYLNYTAPKNKFNFAKLEEELQKIQSTSEMGADYLNVSPENNL |
| | FKFYILTYIMLPVEFKGDFLGFVKNHYYNIKNVDFMDESLLDENEVDSNK |
| | LNEKIENLKDSSFFNKIRLFEKNIKKYEIVKYSVSTQENMKEYFKQLNLDIP |
| | YLDYKSTDEIGIFNKNMILPIFKYYQNVFKLCNDIEIHALLALANKKQQNL |
| | EYAIYCCSKKNSLNYNELLKTFNRKTYQNLSFIRNKIAHLNYKELFSDLFN |
| | NELDLNTKVRCLIEFSQNNKFDQIDLGMNFINDYYMKKTRFIFNQRRLRDL |
| | NVPSKEKIIDGKRKQQNDSNNELLKKYGLSRTNIKDIFNKAWY |
| Fusobacterium | MEKFRRQNRNSIIKIIISNYDTKGIKELKVRYRKQAQLDTFIIKTEIVNNDIFI |
| necrophorum | KSIIEKAREKYRYSFLFDGEEKYHFKNKSSVEIVKKDIFSQTPDNMIRNYKI |
| WP_005959231.1 | TLKISEKNPRVVEAEIEDLMNSTILKDGRRSARREKSMTERKLIEEKVAKN |
| (SEQ ID No. 169) | YSLLANCPMEEVDSIKIYKIKRFLTYRSNMLLYFASINSFLCEGIKGKDNET |
| | EEIWHLKDNDVRKEKVRENFKNKLIQSTENYNSSLKNQIEEKEKLLRKEFK |
| | KGAFYRTIIKKLQQERIKELSEKSLTEDCEKIIKLYSKLRHSLMHYDYQYFE |
| | NLFENKKNDDLMKDLNLDLFKSLPLIRKMKLNNKVNYLEDGDTLFVLQK |
| | TKKAKTLYQIYDALCEQKNGFNKFINDFFVSDGEENTVFKQIINEKFQSEM |
| | EFLEKRISESEKKNEKLKKKLDSMKAHFRNINSEDTKEAYFWDIHSSRNYK |
| | TKYNERKNLVNEYTELLGSSKEKKLLREEITKINRQLLKLKQEMEEITKKN |
| | SLFRLEYKMKIAFGFLFCEFDGNISKFKDEFDASNQEKIIQYHKNGEKYLTS |
| | FLKEEEKEKFNLEKMQKIIQKTEEEDWLLPETKNNLFKFYLLTYLLLPYEL |
| | KGDFLGFVKKHYYDIKNVDFIDENQNNIQVSQTVEKQEDYFYHKIRLFEK |
| | NTKKYEIVKYSIVPNEKLKQYFEDLGIDIKYLTVEQKSEVSEEKNKKVSLK |
| | NNGMFNKTILLFVFKYYQIAFKLFNDIELYSLFFLREKSGKPLEIFRKELESK |
| | MKDGYLNFGQLLYVVYEVLVKNKDLDKILSKKIDYRKDKSFSPEIAYLRN |
| | FLSHLNYSKFLDNFMKINTNKSDENKEVLIPSIKIQKMIQFIEKCNLQNQIDF |
| | DFNFVNDFYMRKEKMFFIQLKQIFPDINSTEKQKMNEKEEILRNRYHLTDK |
| | KNEQIKDEHEAQSQLYEKILSLQKIYSSDKNNFYGRLKEEKLLFLEKQGKK |
| | KLSMEEIKDKIAGDISDLLGILKKEITRDIKDKLTEKFRYCEEKLLNLSFYN |
| | HQDKKKEESIRVFLIRDKNSDNFKFESILDDGSNKIFISKNGKEITIQCCDKV |
| | LETLIIEKNTLKISSNGKIISLIPHYSYSIDVKY |
| Fusobacterium | MEKFRRQNRSSIIKIIISNYDTKGIKELKVRYRKQAQLDTFIIKTEIVNNDIFI |
| necrophorum | KSIIEKAREKYRYSFLFDGEEKYHFKNKSSVEIVKKDIFSQTPDNMIRNYKI |
| WP_035906563.1 | TLKISEKNPRVVEAEIEDLMNSTILKDGRRSARREKSMTERKLIEEKVAEN |
| (SEQ ID No. 170) | YSLLANCPMEEVDSIKIYKIKRFLTYRSNMLLYFASINSFLCEGIKGKDNET |
| | EEIWHLKDNDVRKEKVKENFKNKLIQSTENYNSSLKNQIEEKEKLLRKES |
| | KKGAFYRTIIKKLQQERIKELSEKSLTEDCEKIIKLYSELRHPLMHYDYQYF |
| | ENLFENKENSELTKNLNLDIFKSLPLVRKMKLNNKVNYLEDNDTLFVLQK |
| | TKKAKTLYQIYDALCEQKNGFNKFINDFFVSDGEENTVFKQIINEKFQSETE |
| | FLEKRISESEKKNEKLKKKLDSMKAHFRNINSEDTKEAYFWDIHSSRNYKT |
| | KYNERKNLVNEYTELLGSSKEKKLLREEITKINRQLLKLKQEMEEITKKNS |
| | LFRLEYKMKMAFGFLFCEFDGNISRFKDEFDASNQEKIIQYHKNGEKYLTY |
| | FLKEEEKEKFNLKKLQETIQKTGEENWLLPQNKNNLFKFYLLTYLLLPYEL |
| | KGDFLGFVKKHYYDIKNVDFMDENQSSKIIESKEDDFYHKIRLFEKNTKK |
| | YEIVKYSIVPDKKLKQYFKDLGIDTKYLILDQKSEVSGEKNKKVSLKNNG |
| | MFNKTILLFVFKYYQIAFKLFNDIELYSLFFLREKSGKPFEVFLKELKDKMI |
| | GKQLNFGQLLYVVYEVLVKNKDLSEILSERIDYRKDMCFSAEIADLRNFLS |
| | HLNYSKFLDNFMKINTNKSDENKEVLIPSIKIQKMIKFIEECNLQSQIDFDFN |
| | FVNDFYMRKEKMFFIQLKQIFPDINSTEKQKMNEKEEILRNRYHLTDKKNE |
| | QIKDEHEAQSQLYEKILSLQKIYSSDKNNFYGRLKEEKLLFLEKQEKKKLS |
| | MEEIKDKIAGDISDLLGILKKEITRDIKDKLTEKFRYCEEKLLNLSFYNHQD |
| | KKKEESIRVFLIRDKNSDNFKFESILDDGSNKIFISKNGKEITIQCCDKVLET |
| | LIIEKNTLKISSNGKIISLIPHYSYSIDVKY |
| Fusobacterium | MKVRYRKQAQLDTFIIKTEIVNNDIFIKSIIEKAREKYRYSFLFDGEEKYHF |
| necrophorum | KNKSSVEIVKNDIFSQTPDNMIRNYKITLKISEKNPRVVEAEIEDLMNSTILK |
| WP_035935671.1 | DGRRSARREKSMTERKLIEEKVAENYSLLANCPIEEVDSIKIYKIKRFLTYR |
| (SEQ ID No. 171) | SNMLLYFASINSFLCEGIKGKDNETEEIWHLKDNDVRKEKVKENFKNKLIQ |
| | STENYNSSLKNQIEEKEKLSSKEFKKGAFYRTIIKKLQQERIKELSEKSLTED |
| | CEKIIKLYSELRHPLMHYDYQYFENLFENKENSELTKNLNLDIFKSLPLVR |
| | KMKLNNKVNYLEDNDTLFVLQKTKKAKTLYQIYDALCEQKNGFNKFIND |
| | FFVSDGEENTVFKQIINEKFQSEMEFLEKRISESEKKNEKLKKKLDSMKAH |
| | FRNINSEDTKEAYFWDIHSSRNYKTKYNERKNLVNEYTKLLGSSKEKKLL |
| | REEITKINRQLLKLKQEMEEITKKNSLFRLEYKMKIAFGFLFCEFDGNISKF |
| | KDEFDASNQEKIIQYHKNGEKYLTSFLKEEEKEKFNLEKMQKIIQKTEEED |
| | WLLPETKNNLFKFYLLTYLLLPYELKGDFLGFVKKHYYDIKNVDFMDEN |
| | QNNIQVSQTVEKQEDYFYHKIRLFEKNTKKYEIVKYSIVPNEKLKQYFEDL |
| | GIDIKYLTGSVESGEKWLGENLGIDIKYLTVEQKSEVSEEKNKKVSLKNNG |
| | MFNKTILLFVFKYYQIAFKLFNDIELYSLFFLREKSEKPFEVFLEELKDKMI |
| | GKQLNFGQLLYVVYEVLVKNKDLDKILSKKIDYRKDKSFSPEIAYLRNFLS |
| | HLNYSKFLDNFMKINTNKSDENKEVLIPSIKIQKMIQFIEKCNLQNQIDFDF |
| | NFVNDFYMRKEKMFFIQLKQIFPDINSTEKQKKSEKEEILRKRYHLINKKN |
| | EQIKDEHEAQSQLYEKILSLQKIFSCDKNNFYRRLKEEKLLFLEKQGKKKIS |
| | MKEIKDKIASDISDLLGILKKEITRDIKDKLTEKFRYCEEKLLNISFYNHQD |
| | KKKEEGIRVFLIRDKNSDNFKFESILDDGSNKIFISKNGKEITIQCCDKVLET |
| | LMIEKNTLKISSNGKIISLIPHYSYSIDVKY |
| Fusobacterium | MEKFRRQNRNSIIKIIISNYDTKGIKELKVRYRKQAQLDTFIIKTEIVNNDIFI |
| necrophorum | KSIIEKAREKYRYSFLFDGEEKYHFKNKSSVEIVKKDIFSQTPDNMIRNYKI |
| WP_062624740.1 | TLKISEKNPRVVEAEIEDLMNSTILKDGRRSARREKSMTERKLIEEKVAKN |
| (SEQ ID No. 172) | YSLLANCPMEEVDSIKIYKIKRFLTYRSNMLLYFASINSFLCEGIKGKDNET |
| | EEIWHLKDNDVRKEKVRENFKNKLIQSTENYNSSLKNQIEEKEKLLRKEFK |
| | KGAFYRTIIKKLQQERIKELSEKSLTEDCEKIIKLYSKLRHSLMHYDYQYFE |
| | NLFENKKNDDLMKDLNLDLFKSLPLIRKMKLNNKVNYLEDGDTLFVLQK |
| | TKKAKTLYQIYDALCEQKNGFNKFINDFFVSDGEENTVFKQIINEKFQSEM |
| | EFLEKRISESEKKNEKLKKKLDSMKAHFRNINSEDTKEAYFWDIHSSRNYK |
| | TKYNERKNLVNEYTELLGSSKEKKLLREEITKINRQLLKLKQEMEEITKKN |
| | SLFRLEYKMKIAFGFLFCEFDGNISKFKDEFDASNQEKIIQYHKNGEKYLTS |
| | FLKEEEKEKFNLEKMQKIIQKTEEEDWLLPETKNNLFKFYLLTYLLLPYEL |
| | KGDFLGFVKKHYYDIKNVDFIDENQNNIQVSQTVEKQEDYFYHKIRLFEK |
| | NTKKYEIVKYSIVPNEKLKQYFEDLGIDIKYLTGSVESGEKWLGENLGIDIK |
| | YLTVEQKSEVSEEKNKKVSLKNNGMFNKTILLFVFKYYQIAFKLFNDIELY |
| | SLFFLREKSGKPLEIFRKELESKMKDGYLNFGQLLYVVYEVLVKNKDLDKI |
| | LSKKIDYRKDKSFSPEIAYLRNFLSHLNYSKFLDNFMKINTNKSDENKEVLI |
| | PSIKIQKMIQFIEKCNLQNQIDFDFNFVNDFYMRKEKMFFIQLKQIFPDINST |
| | EKQKMNEKEEILRNRYHLTDKKNEQIKDEHEAQSQLYEKILSLQKIYSSDK |
| | NNFYGRLKEEKLLFLEKQGKKKLSMEEIKDKIAGDISDLLGILKKEITRDIK |
| | DKLTEKFRYCEEKLLNLSFYNHQDKKKEESIRVFLIRDKNSDNFKFESILDD |
| | GSNKIFISKNGKEITIQCCDKVLETLIIEKNTLKISSNGKIISLIPHYSYSIDVK |
| | Y |
| Fusobacterium | MEKFRRQNRNSIIKIIISNYDTKGIKELKVRYRKQAQLDTFIIKTEIVNNDIFI |
| necrophorum | KSIIEKAREKYRYSFLFDGEEKYHFKNKSSVEIVKKDIFSQTPDNMIRNYKI |
| WP_062627846.1 | TLKISEKNPRVVEAEIEDLMNSTILKDGRRSARREKSVTERKLIEEKVAENY |
| (SEQ ID No. 173) | SLLANCPMEEVDSIKIYKIKRFLTYRSNMLLYFASINSFLCEGIKGKENETE |
| | EIWHLKDNDVRKEKVKENFKNKLIQSTENYNSSLKNQIEEKEKLLRKESK |
| | KGAFYRTIIKKLQQERIKELSEKSLTEDCEKIIKLYSKLRHSLMHYDYQYFE |
| | NLFENKETPELKDKLDLHLFKSLPLIRKMKLNNKVNYLEDGDTLFVLQKT |
| | KKAKTLYQIYDALCEQKNGFNKFINDFFVSDGEENTVFKQIINEKFQSEME |
| | FLGKRISESEEKNPKLKKKFDSMKAHFHNINSEDTKEAYFWDIHSSSNYKT |
| | KYNERKNLVNEYTELLGSSKEKKLLREEITQINRKLLKLKQEMEEITKKNS |
| | LFRLEYKMKMAFGFLFCEFDGNISRFKDEFDASNQEKIIQYHKNGEKYLTY |
| | FLKEEEKEKFNLKKLQETIQKTGKENWLLPQNKNNLFKFYLLTYLLLPYEL |
| | KGDFLGFVKKHYYDIKNVDFMDENQSSKIIESKEDDFYHKIRLFEKNTKK |
| | YEIVKYSIVPDEKLKQYFKDLGIDTKYLILEQKSEVSGEKNKKVSLKNNGM |
| | FNKTILLFVFKYYQIAFKLFNDIELYSLFFLREKSGKPFEVFLKELKDKMIG |
| | KQLNFGQLLYVIYEVLVKNKDLSEILSERIDYRKDMCFSAEIADLRNFLSH |
| | LNYSKFLDNFMKINTNKSDENKEVLIPSIKIQKMIKFIEECNLQSQIDFDFNF |
| | VNDFYMRKEKMFFIQLKQIFPDINSTEKQKMNEKEEILRNRYHLTDKKNE |
| | QIKDEHEAQSQLYEKILSLQKIYSSDKNNFYGRLKEEKLLFLGKQGKKKLS |
| | MEEIKDKIAGDISDLLGILKKEITRDIKDKLTEKFRYCEEKLLNLSFYNHQD |
| | KKKEESIRVFLIRDKNSDNFKFESILDDGSNKIFISKNGKEITIQCCDKVLET |
| | LMIEKNTLKISSNGKIISLVPHYSYSIDVKY |
| Fusobacterium | MTEKKSIIFKNKSSVEIVKKDIFSQTPDNMIRNYKITLKISEKNPRVVEAEIE |
| necrophorum | DLMNSTILKDGRRSARREKSMTERKLIEEKVAENYSLLANCPMEEVDSIKI |
| subsp. | YKIKRFLTYRSNMLLYFASINSFLCEGIKGKDNETEEIWHLKDNDVRKEKV |
| funduliforme | KENFKNKLIQSTENYNSSLKNQIEEKEKLLRKESKKGAFYRTIKKLQQERI |
| 1_1_36S | KELSEKSLTEDCEKIIKLYSELRHPLMHYDYQYFENLFENKENSELTKNLN |
| (SEQ ID No. 174) | LDIFKSLPLVRKMKLNNKVNYLEDNDTLFVLQKTKKAKTLYQIYDALCEQ |
| | KNGFNKFINDFFVSDGEENTVFKQIINEKFQSEMEFLEKRISESEKKNEKLK |
| | KKFDSMKAHFHNINSEDTKEAYFWDIHSSSNYKTKYNERKNLVNEYTELL |
| | GSSKEKKLLREEITQINRKLLKLKQEMEEITKKNSLFRLEYKMKIAFGFLFC |
| | EFDGNISKFKDEFDASNQEKIIQYHKNGEKYLTYFLKEEEKEKFNLEKMQK |
| | IIQKTEEEDWLLPETKNNLFKFYLLTYLLLPYELKGDFLGFVKKHYYDIKN |
| | VDFMDENQNNIQVSQTVEKQEDYFYHKIRLFEKNTKKYEIVKYSIVPNEK |
| | LKQYFEDLGIDIKYLTGSVESGEKWLGENLGIDIKYLTVEQKSEVSEEKIKK |
| | FL |
| Fusobacterium | MGKPNRSSIIKIIISNYDNKGIKEVKVRYNKQAQLDTFLIKSELKDGKFILYS |
| perfoetens | IVDKAREKYRYSFEIDKTNINKNEILIIKKDIYSNKEDKVIRKYILSFEVSEK |
| (SEQ ID No. 175) | NDRTIVTKIKDCLETQKKEKFERENTRRLISETERKLLSEETQKTYSKIACC |
| | SPEDIDSVKIYKIKRYLAYRSNMLLFFSLINDIFVKGVVKDNGEEVGEIWRII |
| | DSKEIDEKKTYDLLVENFKKRMSQEFINYKQSIENKIEKNTNKIKEIEQKLK |
| | KEKYKKEINRLKKQLIELNRENDLLEKDKIELSDEEIREDIEKILKIYSDLRH |
| | KLMHYNYQYFENLFENKKISKEKNEDVNLTELLDLNLFRYLPLVRQLKLE |
| | NKTNYLEKEDKITVLGVSDSAIKYYSYYNFLCEQKNGFNNFINSFFSNDGE |
| | ENKSFKEKINLSLEKEIEIMEKETNEKIKEINKNELQLMKEQKELGTAYVLD |
| | IHSLNDYKISHNERNKNVKLQNDIMNGNRDKNALDKINKKLVELKIKMD |
| | KITKRNSILRLKYKLQVAYGFLMEEYKGNIKKFKDEFDISKEKIKSYKSKG |
| | EKYLEVKSEKKYITKILNSIEDIHNITWLKNQEENNLFKFYVLTYILLPFEFR |
| | GDFLGFVKKHYYDIKNVEFLDENNDRLTPEQLEKMKNDSFFNKIRLFEKN |
| | SKKYDILKESILTSERIGKYFSLLNTGAKYFEYGGEENRGIFNKNIIIPIFKYY |
| | QIVLKLYNDVELAMLLTLSESDEKDINKIKELVTLKEKVSPKKIDYEKKYK |
| | FSVLLDCFNRIINLGKKDFLASEEVKEVAKTFTNLAYLRNKICHLNYSKFID |
| | DLLTIDTNKSTTDSEGKLLINDRIRKLIKFIRENNQKMNISIDYNYINDYYM |
| | KKEKFIFGQRKQAKTIIDSGKKANKRNKAEELLKMYRVKKENINLIYELSK |
| | KLNELTKSELFLLDKKLLKDIDFTDVKIKNKSFFELKNDVKEVANIKQALQ |
| | KHSSELIGIYKKEVIMAIKRSIVSKLIYDEEKVLSIIIYDKTNKKYEDFLLEIR |
| | RERDINKFQFLIDEKKEKLGYEKIIETKEKKKVVVKIQNNSELVSEPRIIKNK |
| | DKKKAKTPEEISKLGILDLTNHYCFNLKITL |
| Fusobacterium | MENKGNNKKIDFDENYNILVAQIKEYFTKEIENYNNRIDNIIDKKELLKYSE |
| ulcerans | KKEESEKNKKLEELNKLKSQKLKILTDEEIKADVIKIIKIFSDLRHSLMHYE |
| WP_040490876.1 | YKYFENLFENKKNEELAELLNLNLFKNLTLLRQMKIENKTNYLEGREEFNI |
| (SEQ ID No. 176) | IGKNIKAKEVLGHYNLLAEQKNGFNNFINSFFVQDGTENLEFKKLIDEHFV |
| | NAKKRLERNIKKSKKLEKELEKMEQHYQRLNCAYVWDIHTSTTYKKLYN |
| | KRKSLIEEYNKQINEIKDKEVITAINVELLRIKKEMEEITKSNSLFRLKYKM |
| | QIAYAFLEIEFGGNIAKFKDEFDCSKMEEVQKYLKKGVKYLKYYKDKEAQ |
| | KNYEFPFEEIFENKDTHNEEWLENTSENNLFKFYILTYLLLPMEFKGDFLG |
| | VVKKHYYDIKNVDFTDESEKELSQVQLDKMIGDSFFHKIRLFEKNTKRYEI |
| | IKYSILTSDEIKRYFRLLELDVPYFEYEKGTDEIGIFNKNIILTIFKYYQIIFRL |
| | YNDLEIHGLFNISSDLDKILRDLKSYGNKNINFREFLYVIKQNNNSSTEEEY |
| | RKIWENLEAKYLRLHLLTPEKEEIKTKTKEELEKLNEISNLRNGICHLNYKE |
| | IIEEILKTEISEKNKEATLNEKIRKVINFIKENELDKVELGFNFINDFFMKKEQ |
| | FMFGQIKQVKEGNSDSITTERERKEKNNKKLKETYELNCDNLSEFYETSNN |
| | LRERANSSSLLEDSAFLKKIGLYKVKNNKVNSKVKDEEKRIENIKRKLLKD |
| | SSDIMGMYKAEVVKKLKEKLILIFKHDEEKRIYVTVYDTSKAVPENISKEIL |
| | VKRNNSKEEYFFEDNNKKYVTEYYTLEITETNELKVIPAKKLEGKEFKTEK |
| | NKENKLMLNNHYCFNVKIIY |
| Fusobacterium | MENKNKPNRGSIVRIIISNYDMKGIKELKVRYRKQAQLDTFILQTTLDKSN |
| varium | NSILINDFRVKAREKYRYSFTYDGKEKFSVPSNSIIVTKIDNAAPEKSKEIRK |
| WP_096402050.1 | YKITLGIDEKCKTGSMITAAIEDLLEDDRVREGIRNPRRKASKTERKLITESI |
| (SEQ ID No. 177) | CHNYAQITQCPVEEIDAVKIYKVKRFLSYRSNMLLFFALINDFLCKNLKNE |
| | KGEKINEIWEMENKGNNKKIDFDENYNILVAQIKEYFTKEIENYNNRIDNII |
| | DKKELLKYSEEKEESEKNKKLEELNKLESQKLKILTDEEIKADVIKIIKIFSD |
| | LRHSLMHYEYKYFENLFENKKNEELAELLNLNLFKNLTLLRQMKIENKTN |
| | YLEGDEKFNILGKDVRAKNALGHYDLLVEQKNGFNNFINSFFVQDGTENL |
| | EFKKFIDENFIKAQKELEEDIKNCKESVKKLEKKLKENPKKSEDLEKKLEK |
| | KQKKLKELKKELEKMKQHYKRLNCAYVWDIHSSTVYKKLYNERKNLIEK |
| | YNKQLNGLQDKNAITGINAQLLRIKKEMEEITKSNSLFRLKYKMQIAYAFL |
| | EMEYEGNIAKFKNEFDCSKTEKIQEWLEKSEEYLNYCMEKEEDGKNYKF |
| | HFKEISEIKDTHNEEWLENTSENNLFKFYILTYLLLPMEFKGDFLGVVKKH |
| | YYDIKNVDFTDESEKELSQEQIDKMIGDSFFHKIRLFEKNTKRYEIIKYSILT |
| | SDEIKKYFELLELKVPYLEYKGIDEIGIFNKNIILPIFKYYQIIFRLYNDLEIHG |
| | LFNVSFDINKILSDLKSYGNENINFREFLYVIKQNNNSSTEEEYQKIWEKLE |
| | SKYLKEPLLTPEKKEINKKTEKELKKLDGISFLRNKISHLEYEKIIEGVLKTA |
| | VNGENKKTSETNADKVFLNEKIKKIINFIKENELDKIELGFNFINDFFMKKE |
| | QFMFGQIKQVKEGNSDSITTERKRKEENNKRLKITYGLNYNNLSKIYEFSN |
| | TLREIVNSPLFLKDSTLLKKVDLSKVMLKEKPICSLQYENNTKLEDDIKRIL |
| | LKDSSDIMGIYKAEVVKKLKEKLVLIFKYDEEKKIYVTVYDTSKAVPENIS |
| | KEILVKRNNSKEEYFFEDNKKKYTTQYYTLEITKENELKVIPAKKLEGKEF |
| | KTEKKEENKLMLNNHYCFNVKIIY |
| Tissierella | MEKDKKGEKIDISQEMIEEDLRKILILFSRLRHSMVHYDYEFYQALYSGKD |
| sp. P1 | FVISDKNNLENRMISQLLDLNIFKELSKVKLIKDKAISNYLDKNTTIHVLGQ |
| WP_094899336.1 | DIKAIRLLDIYRDICGSKNGFNKFINTMITISGEEDREYKEKVIEHFNKKME |
| (SEQ ID No. 178) | NLSTYLEKLEKQDNAKRNNKRVYNLLKQKLIEQQKLKEWFGGPYVYDIH |
| | SSKRYKELYIERKKLVDRHSKLFEEGLDEKNKKELTKINDELSKLNSEMKE |
| | MTKLNSKYRLQYKLQLAFGFILEEFDLNIDTFINNFDKDKDLIISNFMKKR |
| | DIYLNRVLDRGDNRLKNIIKEYKFRDTEDIFCNDRDNNLVKLYILMYILLP |
| | VEIRGDFLGFVKKNYYDMKHVDFIDKKDKEDKDTFFHDLRLFEKNIRKLE |
| | ITDYSLSSGFLSKEHKVDIEKKINDFINRNGAMKLPEDITIEEFNKSLILPIMK |
| | NYQINFKLLNDIEISALFKIAKDRSITFKQAIDEIKNEDIKKNSKKNDKNNH |
| | KDKNINFTQLMKRALHEKIPYKAGMYQIRNNISHIDMEQLYIDPLNSYMN |
| | SNKNNITISEQIEKIIDVCVTGGVTGKELNNNIINDYYMKKEKLVFNLKLRK |
| | QNDIVSIESQEKNKREEFVFKKYGLDYKDGEINIIEVIQKVNSLQEELRNIK |
| | ETSKEKLKNKETLFRDISLINGTIRKNINFKIKEMVLDIVRMDEIRHINIHIYY |
| | KGENYTRSNIIKFKYAIDGENKKYYLKQHEINDINLELKDKFVTLICNMDK |
| | HPNKNKQTINLESNYIQNVKFIIP |
| Fusobacterium | MEKFRRQNRNSIIKIIISNYDTKGIKELKVRYRKQAQLDTFIIKTEIVNNDIFIKSIIEK |
| necrophorum | AREKYRYSFLFDGEEKYHFKNKSSVEIVKKDIFSQTPDNMIRNYKITLKISEKNPR |
| subsp. | VVEAEIEDLMNSTILKDGRRSARREKSMTERKLIEEKVAKNYSLLANCPMEEVDS |
| funduliforme | IKIYKIKRFLTYRSNMLLYFASINSFLCEGIKGKDNETEEIWHLKDNDVRKEKVRE |
| ATCC 51357 | NFKNKLIQSTENYNSSLKNQIEEKEKLLRKEFKKGAFYRTIIKKLQQERIKELSEKS |
| contig00003 | LTEDCEKIIKLYSKLRHSLMHYDYQYFENLFENKKNDDLMKDLNLDLFKSLPLIR |
| (SEQ ID No. 32) | KMKLNNKVNYLEDGDTLFVLQKTKKAKTLYQIYDALCEQKNGFNKFINDFFVSD |
| | GEENTVFKQIINEKFQSEMEFLEKRISESEKKNEKLKKKLDSMKAHFRNINSEDTK |
| | EAYFWDIHSSRNYKTKYNERKNLVNEYTELLGSSKEKKLLREEITKINRQLLKLK |
| | QEMEEITKKNSLFRLEYKMKIAFGFLFCEFDGNISKFKDEFDASNQEKIIQYHKNG |
| | EKYLTSFLKEEEKEKFNLEKMQKIIQKTEEEDWLLPETKNNLFKFYLLTYLLLPYE |
| | LKGDFLGFVKKHYYDIKNVDFIDENQNNIQVSQTVEKQEDYFYHKIRLFEKNTKK |
| | YEIVKYSIVPNEKLKQYFEDLGIDIKYLTVEQKSEVSEEKNKKVSLKNNGMFNKTI |
| | LLFVFKYYQIAFKLFNDIELYSLFFLREKSGKPLEIFRKELESKMKDGYLNFGQLL |
| | YVVYEVLVKNKDLDKILSKKIDYRKDKSFSPEIAYLRNFLSHLNYSKFLDNFMKI |
| | NTNKSDENKEVLIPSIKIQKMIQFIEKCNLQNQIDFDFNFVNDFYMRKEKMFFIQL |
| | KQIFPDINSTEKQKMNEKEEILRNRYHLTDKKNEQIKDEHEAQSQLYEKILSLQKI |
| | YSSDKNNFYGRLKEEKLLFLEKQGKKKLSMEEIKDKIAGDISDLLGILKKEITRDIK |
| | DKLTEKFRYCEEKLLNLSFYNHQDKKKEESIRVFLIRDKNSDNFKFESILDDGSNK |
| | IFISKNGKEITIQCCDKVLETLIIEKNTLKISSNGKIISLIPHYSYSIDVKY |
| Fusobacterium | MEKFRRQNRSSIIKIIISNYDTKGIKELKVRYRKQAQLDTFIIKTEIVNNDIFIKSIIEK |
| necrophorum | AREKYRYSFLFDGEEKYHFKNKSSVEIVKKDIFSQTPDNMIRNYKITLKISEKNPR |
| DJ-2 | VVEAEIEDLMNSTILKDGRRSARREKSMTERKLIEEKVAENYSLLANCPMEEVDSI |
| contig0065, | KIYKIKRFLTYRSNMLLYFASINSFLCEGIKGKDNETEEIWHLKDNDVRKEKVKEN |
| whole genome | FKNKLIQTENYNSSLKNQIEEKEKLLRKESKKGAFYRTIIKKLQQERIKELSEKSL |
| shotgun sequence | TEDCEKIIKLYSELRHPLMHYDYQYFENLFENKENSELTKNLNLDIFKSLPLVRKM |
| (SEQ ID No. 33) | KLNNKVNYLEDNDTLFVLQKTKKAKTLYQIYDALCEQKNGFNKFINDFFVSDGE |
| | ENTVFKQIINEKFQSEIEFLEKRISESEKKNEKLKKKLDSMKAHFRNINSEDTKEAY |
| | FWDIHSSRNYKTKYNERKNLVNEYTELLGSSKEKKLLREEITKINRQLLKLKQEM |
| | EEITKKNSLFRLEYKMKMAFGFLFCEFDGNISRFKDEFDASNQEKIIQYHKNGEKY |
| | LTYFLKEEEKEKFNLKKLQETIQKTGEENWLLPQNKNNLFKFYLLTYLLLPYELK |
| | GDFLGFVKKHYYDIKNVDFMDENQSSKIIESKEDDFYHKIRLFEKNTKKYEIVKYS |
| | IVPDKKLKQYFKDLGIDTKYLILDQKSEVSGEKNKKVSLKNNGMFNKTILLFVFK |
| | YYQIAFKLFNDIELYSLFFLREKSGKPFEVFLKELKDKMIGKQLNFGQLLYVVYEV |
| | LVKNKDLSEILSERIDYRKDMCFSAEIADLRNFLSHLNYSKFLDNFMKINTNKSDE |
| | NKEVLIPSIKIQKMIKFIEECNLQSQIDFDFNFVNDFYMRKEKMFFIQLKQIFPDINS |
| | TEKQKMNEKEEILRNRYHLTDKKNEQIKDEHEAQSQLYEKILSLQKIYSSDKNNF |
| | YGRLKEEKLLFLEKQEKKKLSMEEIKDKIAGDISDLLGILKKEITRDIKDKLTEKFR |
| | YCEEKLLNLSFYNHQDKKKEESIRVFLIRDKNSDNFKFESILDDGSNKIFISKNGKE |
| | ITIQCCDKVLETLIIEKNTLKISSNGKIISLIPHYSYSIDVKY |
| Fusobacterium | MKVRYRKQAQLDTFIIKTEIVNNDIFIKSIIEKAREKYRYSFLFDGEEKYHFKNKSS |
| necrophorum | VEIVKNDIFSQTPDNMIRNYKITLKISEKNPRVVEAEIEDLMNSTILKDGRRSARRE |
| BFTR-1 | KSMTERKLIEEKVAENYSLLANCPIEEVDSIKIYKIKRFLTYRSNMLLYFASINSFL |
| contig0068 | CEGIKGKDNETEEIWHLKDNDVRKEKVKENFKNKLIQSTENYNSSLKNQIEEKEK |
| (SEQ ID No. 34) | LSSKEFKKGAFYRTIIKKLQQERIKELSEKSLTEDCEKIIKLYSELRHPLMHYDYQY |
| | FENLFENKENSELTKNLNLDIFKSLPLVRKMKLNNKVNYLEDNDTLFVLQKTKK |
| | AKTLYQIYDALCEQKNGFNKFINDFFVSDGEENTVFKQIINEKFQSEMEFLEKRISE |
| | SEKKNEKLKKKLDSMKAHFRNINSEDTKEAYFWDIHSSRNYKTKYNERKNLVNE |
| | YTKLLGSSKEKKLLREEITKINRQLLKLKQEMEEITKKNSLFRLEYKMKIAFGFLF |
| | CEFDGNISKFKDEFDASNQEKIIQYHKNGEKYLTSFLKEEEKEKFNLEKMQKIIQK |
| | TEEEDWLLPETKNNLFKFYLLTYLLLPYELKGDFLGFVKKHYYDIKNVDFMDEN |
| | QNNIQVSQTVEKQEDYFYHKIRLFEKNTKKYEIVKYSIVPNEKLKQYFEDLGIDIK |
| | YLTGSVESGEKWLGENLGIDIKYLTVEQKSEVSEEKNKKVSLKNNGMFNKTILLF |
| | VFKYYQIAFKLFNDIELYSLFFLREKSEKPFEVFLEELKDKMIGKQLNFGQLLYVV |
| | YEVLVKNKDLDKILSKKIDYRKDKSFSPEIAYLRNFLSHLNYSKFLDNFMKINTNK |
| | SDENKEVLIPSIKIQKMIQFIEKCNLQNQIDFDFNFVNDFYMRKEKMFFIQLKQIFP |
| | DINSTEKQKKSEKEEILRKRYHLINKKNEQIKDEHEAQSQLYEKILSLQKIFSCDKN |
| | NFYRRLKEEKLLFLEKQGKKKISMKEIKDKIASDISDLLGILKKEITRDIKDKLTEK |
| | FRYCEEKLLNISFYNHQDKKKEEGIRVFLIRDKNSDNFKFESILDDGSNKIFISKNG |
| | KEITIQCCDKVLETLMIEKNTLKISSNGKIISLIPHYSYSIDVKY |
| Fusobacterium | MTEKKSIIFKNKSSVEIVKKDIFSQTPDNMIRNYKITLKISEKNPRVVEAEIEDLMN |
| necrophorum | STILKDGRRSARREKSMTERKLIEEKVAENYSLLANCPMEEVDSIKIYKIKRFLTY |
| subsp. | RSNMLLYFASINSFLCEGIKGKDNETEEIWHLKDNDVRKEKVKENFKNKLIQSTE |
| funduliforme | NYNSSLKNQIEEKEKLLRKESKKGAFYRTIIKKLQQERIKELSEKSLTEDCEKIIKL |
| 1_1_36S | YSELRHPLMHYDYQYFENLFENKENSELTKNLNLDIFKSLPLVRKMKLNNKVNY |
| cont1.14 | LEDNDTLFVLQKTKKAKTLYQIYDALCEQKNGFNKFINDFFVSDGEENTVFKQIIN |
| (SEQ ID No. 35) | EKFQSEMEFLEKRISESEKKNEKLKKKFDSMKAHFHNINSEDTKEAYFWDIHSSS |
| | NYKTKYNERKNLVNEYTELLGSSKEKKLLREEITQINRKLLKLKQEMEEITKKNS |
| | LFRLEYKMKIAFGFLFCEFDGNISKFKDEFDASNQEKIIQYHKNGEKYLTYFLKEE |
| | EKEKFNLEKMQKIIQKTEEEDWLLPETKNNLFKFYLLTYLLLPYELKGDFLGFVK |
| | KHYYDIKNVDFMDENQNNIQVSQTVEKQEDYFYHKIRLFEKNTKKYEIVKYSIVP |
| | NEKLKQYFEDLGIDIKYLTGSVESGEKWLGENLGIDIKYLTVEQKSEVSEEKIKKF |
| | L |
| Fusobacterium | MGKPNRSSIIKIIISNYDNKGIKEVKVRYNKQAQLDTFLIKSELKDGKFILYSIVDK |
| perfoetens | AREKYRYSFEIDKTNINKNEILIIKKDIYSNKEDKVIRKYILSFEVSEKNDRTIVTKI |
| ATCC 29250 | KDCLETQKKEKFERENTRRLISETERKLLSEETQKTYSKIACCSPEDIDSVKIYKIK |
| T364DRAFT_ | RYLAYRSNMLLFFSLINDIFVKGVVKDNGEEVGEIWRIIDSKEIDEKKTYDLLVEN |
| scaffold00009.9_C | FKKRMSQEFINYKQSIENKIEKNTNKIKEIEQKLKKEKYKKEINRLKKQLIELNREN |
| (SEQ ID No. 36) | DLLEKDKIELSDEEIREDIEKILKIYSDLRHKLMHYNYQYFENLFENKKISKEKNED |
| | VNLTELLDLNLFRYLPLVRQLKLENKTNYLEKEDKITVLGVSDSAIKYYSYYNFL |
| | CEQKNGFNNFINSFFSNDGEENKSFKEKINLSLEKEIEIMEKETNEKIKEINKNELQ |
| | LMKEQKELGTAYVLDIHSLNDYKISHNERNKNVKLQNDIMNGNRDKNALDKINK |
| | KLVELKIKMDKITKRNSILRLKYKLQVAYGFLMEEYKGNIKKFKDEFDISKEKIKS |
| | YKSKGEKYLEVKSEKKYITKILNSIEDIHNITWLKNQEENNLFKFYVLTYILLPFEF |
| | RGDFLGFVKKHYYDIKNVEFLDENNDRLTPEQLEKMKNDSFFNKIRLFEKNSKKY |
| | DILKESILTSERIGKYFSLLNTGAKYFEYGGEENRGIFNKNIIIPIFKYYQIVLKLYND |
| | VELAMLLTLSESDEKDINKIKELVTLKEKVSPKKIDYEKKYKFSVLLDCFNRIINLG |
| | KKDFLASEEVKEVAKTFTNLAYLRNKICHLNYSKFIDDLLTIDTNKSTTDSEGKLL |
| | INDRIRKLIKFIRENNQKMNISIDYNYINDYYMKKEKFIFGQRKQAKTIIDSGKKAN |
| | KRNKAEELLKMYRVKKENINLIYELSKKLNELTKSELFLLDKKLLKDIDFTDVKIK |
| | NKSFFELKNDVKEVANIKQALQKHSSELIGIYKKEVIMAIKRSIVSKLIYDEEKVLS |
| | IIIYDKTNKKYEDFLLEIRRERDINKFQFLIDEKKEKLGYEKIIETKEKKKVVVKIQN |
| | NSELVSEPRIIKNKDKKKAKTPEEISKLGILDLTNHYCFNLKITL |
| Fusobacterium | MENKGNNKKIDFDENYNILVAQIKEYFTKEIENYNNRIDNIIDKKELLKYSEKKEE |
| ulcerans | SEKNKKLEELNKLKSQKLKILTDEEIKADVIKIIKIFSDLRHSLMHYEYKYFENLFE |
| ATCC 49185 | NKKNEELAELLNLNLFKNLTLLRQMKIENKTNYLEGREEFNIIGKNIKAKEVLGH |
| cont2 .38 | YNLLAEQKNGFNNFINSFFVQDGTENLEFKKLIDEHFVNAKKRLERNIKKSKKLE |
| (SEQ ID No. 37) | KELEKMEQHYQRLNCAYVWDIHTSTTYKKLYNKRKSLIEEYNKQINEIKDKEVIT |
| | AINVELLRIKKEMEEITKSNSLFRLKYKMQIAYAFLEIEFGGNIAKFKDEFDCSKM |
| | EEVQKYLKKGVKYLKYYKDKEAQKNYEFPFEEIFENKDTHNEEWLENTSENNLF |
| | KFYILTYLLLPMEFKGDFLGVVKKHYYDIKNVDFTDESEKELSQVQLDKMIGDSF |
| | FHKIRLFEKNTKRYEIIKYSILTSDEIKRYFRLLELDVPYFEYEKGTDEIGIFNKNIIL |
| | TIFKYYQIIFRLYNDLEIHGLFNISSDLDKILRDLKSYGNKNINFREFLYVIKQNNNS |
| | STEEEYRKIWENLEAKYLRLHLLTPEKEEIKTKTKEELEKLNEISNLRNGICHLNY |
| | KEIIEEILKTEISEKNKEATLNEKIRKVINFIKENELDKVELGFNFINDFFMKKEQFM |
| | FGQIKQVKEGNSDSITTERERKEKNNKKLKETYELNCDNLSEFYETSNNLRERAN |
| | SSSUEDSAFLKKIGLYKVKNNKVNSKVKDEEKRIENIKRKLLKDSSDIMGMYKA |
| | EVVKKLKEKLILIFKHDEEKRIYVTVYDTSKAVPENISKEILVKRNNSKEEYFFED |
| | NNKKYVTEYYTLEITETNELKVIPAKKLEGKEFKTEKNKENKLMLNNHYCFNVKI |
| | IY |
| Anaerosalibacter | MKSGRREKAKSNKSSIVRVIISNFDDKQVKEIKVLYTKQGGIDVIKFKSTEKDEKG |
| sp. ND1 genome | RMKFNFDCAYNRLEEEEFNSFGGKGKQSFFVTTNEDLTELHVTKRHKTTGEIIKD |
| assembly | YTIQGKYTPIKQDRTKVTVSITDNKDHFDSNDLGDKIRLSRSLTQYTNRILLDADV |
| Anaerosalibacter | MKNYREIVCSDSEKVDETINIDSQEIYKINRFLSYRSNMITYYQMINNFLLHYDGEE |
| massiliensis | DKGGNDSINLINEIWKYENKKNDEKEKIIERSYKSIEKSINQYILNHNTEVESGDKE |
| ND1 (SEQ ID No. 38) | KKIDISEERIKEDLKKTFILFSRLRHYMVHYNYKFYENLYSGKNFIIYNKDKSKSRR |
| | FSELLDLNIFKELSKIKLVKNRAVSNYLDKKTTIHVLNKNINAIKLLDIYRDICETK |
| | NGFNNFINNMMTISGEEDKEYKEMVTKHFNENMNKLSIYLENFKKHSDFKTNNK |
| | KKETYNLLKQELDEQKKLRLWFNAPYVYDIHSSKKYKELYVERKKYVDIHSKLI |
| | EAGINNDNKKKLNEINVKLCELNTEMKEMTKLNSKYRLQYKLQLAFGFILEEFNL |
| | DIDKFVSAFDKDNNLTISKFMEKRETYLSKSLDRRDNRFKKLIKDYKFRDTEDIFC |
| | SDRENNLVKLYILMYILLPVEIRGDFLGFVKKNYYDLKHVDFIDKRNNDNKDTFF |
| | HDLRLFEKNVKRLEVTSYSLSDGFLGKKSREKFGKELEKFIYKNVSIALPTNIDIKE |
| | FNKSLVLPMMKNYQIIFKLLNDIEISALFLIAKKEGNEGSITFKKVIDKVRKEDMN |
| | GNINFSQVMKMALNEKVNCQIRNSIAHINMKQLYIEPLNIYINNNQNKKTISEQME |
| | EIIDICITKGLTGKELNKNIINDYYMKKEKLVFNLKLRKRNNLVSIDAQQKNMKEK |
| | SILNKYDLNYKDENLNIKEIILKVNDLNNKQKLLKETTEGESNYKNALSKDILLLN |
| | GIIRKNINFKIKEMILGIIQQNEYRYVNINIYDKIRKEDHNIDLKINNKYIEISCYENK |
| | SNESTDERINFKIKYMDLKVKNELLVPSCYEDIYIKKKIDLEIRYIENCKVVYIDIY |
| | YKKYNINLEFDGKTLFVKFNKDVKKNNQKVNLESNYIQNIKFIVS |

[1090] While preferred embodiments of the present invention have been shown and described herein, it will be obvious to those skilled in the art that such embodiments are provided by way of example only. Numerous variations, changes, and substitutions will now occur to those skilled in the art without departing from the invention. It should be understood that various alternatives to the embodiments of the invention described herein may be employed in practicing the invention. It is intended that the following claims define the scope of the invention and that methods and structures within the scope of these claims and their equivalents be covered thereby.

The application's sequence listing, which the Patent Office published only in electronic form, follows.

SEQUENCE LISTING (178 sequences)

SEQ ID NO: 1 - protein, 7 aa, Simian virus 40
PKKKRKV

SEQ ID NO: 2 - protein, 16 aa, Artificial Sequence
  Synthetic
KRPAATKKAGQAKKKK

SEQ ID NO: 3 - protein, 9 aa, Artificial Sequence
  Synthetic
PAAKRVKLD

SEQ ID NO: 4 - protein, 11 aa, Artificial Sequence
  Synthetic
RQRRNELKRSP

SEQ ID NO: 5 - protein, 38 aa, Artificial Sequence
  Synthetic
NQSSNFGPMKGGNFGGRSSGPYGGGGQYFAKPRNQGGY

SEQ ID NO: 6 - protein, 42 aa, Artificial Sequence
  Synthetic
RMRIZFKNKGKDTAELRRRRVEVSVELRKAKKDEQILKRRNV

SEQ ID NO: 7 - protein, 8 aa, Artificial Sequence
  Synthetic
VSRKRPRP

SEQ ID NO: 8 - protein, 8 aa, Artificial Sequence
  Synthetic
PPKKARED

SEQ ID NO: 9 - protein, 8 aa, Homo sapiens
  misc_feature (2)..(2): Xaa can be any naturally occurring amino acid
PXPKKKPL

SEQ ID NO: 10 - protein, 12 aa, Mus
SALIKKKKKMAP

SEQ ID NO: 11 - protein, 5 aa, Influenza NS1
DRLRR

SEQ ID NO: 12 - protein, 7 aa, Influenza NS1
PKQKKRK

SEQ ID NO: 13 - protein, 10 aa, Hepatitis virus
RKLKKKIKKL

SEQ ID NO: 14 - protein, 10 aa, Mus
REKKKFLKRR

SEQ ID NO: 15 - protein, 20 aa, Homo sapiens
KRKGDEVDGVDEVAKKKSKK

SEQ ID NO: 16 - protein, 17 aa, Homo sapiens
RKCLQAGMNLEARKTKK

SEQ ID NO: 17 - protein, 11 aa, Artificial Sequence
  Synthetic
LYPERLRRILT

SEQ ID NO: 18 - DNA, 33 bp, Artificial Sequence
  Synthetic
ctgtaccctgagcggctgcggcggatcctgacc

SEQ ID NO: 19 - protein, 1001 aa, Artificial Sequence
  Synthetic
  misc_feature (7)..(9): Xaa can be any naturally occurring amino acid
  misc_feature (11)..(11): Xaa can be any naturally occurring amino acid
  misc_feature (14)..(16): Xaa can be any naturally occurring amino acid
  misc_feature (20)..(20): Xaa can be any naturally occurring amino acid
  misc_feature (22)..(22): Xaa can be any naturally occurring amino acid
  misc_feature (29)..(29): Xaa can be any naturally occurring amino acid
  misc_feature (36)..(36): Xaa can be any naturally occurring amino acid
  misc_feature (42)..(43): Xaa can be any naturally occurring amino acid
  misc_feature (48)..(48): Xaa can be any naturally occurring amino acid
  misc_feature (52)..(53): Xaa can be any naturally occurring amino acid
  misc_feature (57)..(57): Xaa can be any naturally occurring amino acid
  misc_feature (59)..(59): Xaa can be any naturally occurring amino acid
  misc_feature (69)..(71): Xaa can be any naturally occurring amino acid
  misc_feature (73)..(73): Xaa can be any naturally occurring amino acid
  misc_feature (75)..(75): Xaa can be any naturally occurring amino acid
  misc_feature (78)..(79): Xaa can be any naturally occurring amino acid
  misc_feature (86)..(86): Xaa can be any naturally occurring amino acid
  misc_feature (89)..(89): Xaa can be any naturally occurring amino acid
  MISC_FEATURE (90)..(90): X represents AA code J
  misc_feature (101)..(101): Xaa can be any naturally occurring amino acid
  misc_feature (104)..(104): Xaa can be any naturally occurring amino acid
  misc_feature (111)..(111): Xaa can be any naturally occurring amino acid
  misc_feature (116)..(116): Xaa can be any naturally occurring amino acid
  misc_feature (121)..(121): Xaa can be any naturally occurring amino acid
  misc_feature (128)..(130): Xaa can be any naturally occurring amino acid
  misc_feature (133)..(133): Xaa can be any naturally occurring amino acid
  misc_feature (145)..(145): Xaa can be any naturally occurring amino acid
  misc_feature (148)..(148): Xaa can be any naturally occurring amino acid
  misc_feature (167)..(167): Xaa can be any naturally occurring amino acid
  misc_feature (174)..(174): Xaa can be any naturally occurring amino acid
  misc_feature (192)..(192): Xaa can be any naturally occurring amino acid
  misc_feature (194)..(195): Xaa can be any naturally occurring amino acid
  misc_feature (199)..(199): Xaa can be any naturally occurring amino acid
  misc_feature (202)..(203): Xaa can be any naturally occurring amino acid
  misc_feature (206)..(206): Xaa can be any naturally occurring amino acid
  misc_feature (217)..(219): Xaa can be any naturally occurring amino acid
  misc_feature (228)..(228): Xaa can be any naturally occurring amino acid
  misc_feature (233)..(233): Xaa can be any naturally occurring amino acid
  MISC_FEATURE (236)..(236): X represents AA code J
  misc_feature (243)..(243): Xaa can be any naturally occurring amino acid
  misc_feature (245)..(245): Xaa can be any naturally occurring amino acid
  misc_feature (262)..(262): Xaa can be any naturally occurring amino acid
  MISC_FEATURE (267)..(267): X represents AA code J
  misc_feature (277)..(278): Xaa can be any naturally occurring amino acid
  misc_feature (282)..(282): Xaa can be any naturally occurring amino acid
  misc_feature (287)..(287): Xaa can be any naturally occurring amino acid
  misc_feature (307)..(307): Xaa can be any naturally occurring amino acid
  misc_feature (314)..(314): Xaa can be any naturally occurring amino acid
  misc_feature (320)..(321): Xaa can be any naturally occurring amino acid
  misc_feature (333)..(333): Xaa can be any naturally occurring amino acid
  misc_feature (343)..(343): Xaa can be any naturally occurring amino acid
  misc_feature (357)..(357): Xaa can be any naturally occurring amino acid
  misc_feature (367)..(367): Xaa can be any naturally occurring amino acid
  misc_feature (371)..(371): Xaa can be any naturally occurring amino acid
  misc_feature (374)..(375): Xaa can be any naturally occurring amino acid
  misc_feature (378)..(378): Xaa can be any naturally occurring amino acid
  misc_feature (392)..(392): Xaa can be any naturally occurring amino acid
  misc_feature (402)..(402): Xaa can be any naturally occurring amino acid
  misc_feature (414)..(415): Xaa can be any naturally occurring amino acid
  MISC_FEATURE (418)..(418): X represents AA code J
  misc_feature (446)..(446): Xaa can be any naturally occurring amino acid
  misc_feature (448)..(449): Xaa can be any naturally occurring amino acid
  misc_feature (451)..(451): Xaa can be any naturally occurring amino acid
  misc_feature (467)..(467): Xaa can be any naturally occurring amino acid
  misc_feature (489)..(489): Xaa can be any naturally occurring amino acid
  misc_feature (500)..(500): Xaa can be any naturally occurring amino acid
  misc_feature (510)..(510): Xaa can be any naturally occurring amino acid
  misc_feature (514)..(514): Xaa can be any naturally occurring amino acid
  misc_feature (528)..(529): Xaa can be any naturally occurring amino acid
  misc_feature (532)..(532): Xaa can be any naturally occurring amino acid
  misc_feature (539)..(539): Xaa can be any naturally occurring amino acid
  misc_feature (547)..(548): Xaa can be any naturally occurring amino acid
  misc_feature (551)..(551): Xaa can be any naturally occurring amino acid
  misc_feature (553)..(554): Xaa can be any naturally occurring amino acid
  misc_feature (565)..(565): Xaa can be any naturally occurring amino acid
  misc_feature (576)..(576): Xaa can be any naturally occurring amino acid
  misc_feature (587)..(588): Xaa can be any naturally occurring amino acid
  misc_feature (600)..(600): Xaa can be any naturally occurring amino acid
  misc_feature (604)..(605): Xaa can be any naturally occurring amino acid
  misc_feature (622)..(622): Xaa can be any naturally occurring amino acid
  misc_feature (627)..(627): Xaa can be any naturally occurring amino acid
  misc_feature (629)..(629): Xaa can be any naturally occurring amino acid
  misc_feature (655)..(655): Xaa can be any naturally occurring amino acid
  misc_feature (662)..(662): Xaa can be any naturally occurring amino acid
  misc_feature (682)..(682): Xaa can be any naturally occurring amino acid
  misc_feature (686)..(686): Xaa can be any naturally occurring amino acid
  MISC_FEATURE (688)..(688): X represents AA code J
  misc_feature (691)..(691): Xaa can be any naturally occurring amino acid
  misc_feature (698)..(698): Xaa can be any naturally occurring amino acid
  misc_feature (706)..(706): Xaa can be any naturally occurring amino acid
  misc_feature (723)..(723): Xaa can be any naturally occurring amino acid
  MISC_FEATURE (737)..(737): X represents AA code J
  misc_feature (738)..(738): Xaa can be any naturally occurring amino acid
  misc_feature (760)..(761): Xaa can be any naturally occurring amino acid
  misc_feature (771)..(771): Xaa can be any naturally occurring amino acid
  misc_feature (773)..(773): Xaa can be any naturally occurring amino acid
  misc_feature (779)..(779): Xaa can be any naturally occurring amino acid
  misc_feature (786)..(786): Xaa can be any naturally occurring amino acid
  misc_feature (790)..(790): Xaa can be any naturally occurring amino acid
  misc_feature (798)..(798): Xaa can be any naturally occurring amino acid
  misc_feature (800)..(800): Xaa can be any naturally occurring amino acid
  misc_feature (834)..(834): Xaa can be any naturally occurring amino acid
  misc_feature (843)..(843): Xaa can be any naturally occurring amino acid
  misc_feature (851)..(852): Xaa can be any naturally occurring amino acid
  misc_feature (866)..(866): Xaa can be any naturally occurring amino acid
  misc_feature (870)..(870): Xaa can be any naturally occurring amino acid
  misc_feature (873)..(873): Xaa can be any naturally occurring amino acid
  misc_feature (877)..(877): Xaa can be any naturally occurring amino acid
  misc_feature (889)..(889): Xaa can be any naturally occurring amino acid
  misc_feature (896)..(896): Xaa can be any naturally occurring amino acid
  misc_feature (916)..(916): Xaa can be any naturally occurring amino acid
  misc_feature (923)..(923): Xaa can be any naturally occurring amino acid
  misc_feature (936)..(936): Xaa can be any naturally occurring amino acid
  misc_feature (962)..(962): Xaa can be any naturally occurring amino acid
  misc_feature (966)..(966): Xaa can be any naturally occurring amino acid
  misc_feature (970)..(970): Xaa can be any naturally occurring amino acid
  misc_feature (985)..(985): Xaa can be any naturally occurring amino acid
  misc_feature (996)..(996): Xaa can be any naturally occurring amino acid
MKISKVXXXVXKKXXXGKLXKXVNERNRXAKRLSNXLBKYIXXIDKIXKKEXXKKFXAXEEITLKLNQXXXBXLXKAXXDLRKDNXYSXXKKILHNEDINXEEXELLINDXLEKLXKIESXKYSYQKXXXNYXMSVQEHSKKSIXRIXESAKRNKEALDKFLKEYAXLDPRMEXLAKLRKLLELYFYFKNDXIXXEEEXNVXXHKXLKENHPDFVEXXXNKENAELNXYAIEXKKXLKYYFPXKXAKNSNDKIFEKQELKKXWIHQXENAVERILLXXGKVXYKLQXGYLAELWKIRINEIFIKYIXVGKAVAXFALRNXXKBENDILGGKIXKKLNGITSFXYEKIKAEEILQREXAVEVAFAANXLYAXDLXXIRXSILQFFGGASNWDXFLFFHFATSXISDKKWNAELIXXKKXGLVIREKLYSNNVAMFYSKDDLEKLLNXLXXFXLRASQVPSFKKVYVRXBFPQNLLKKFNDEKDDEAYSAXYYLLKEIYYNXFLPYFSANNXFFFXVKNLVLKANKDKFXXAFXDIREMNXGSPIEYLXXTQXNXXNEGRKKEEKEXDFIKFLLQIFXKGFDDYLKNNXXFILKFIPEPTEXIEIXXELQAWYIVGKFLNARKXNLLGXFXSYLKLLDDIELRALRNENIKYQSSNXEKEVLEXCLELIGLLSLDLNDYFBDEXDFAXYXGKXLDFEKKXMKDLAELXPYDQNDGENPIVNRNIXLAKKYGTLNLLEKXXDKVSEKEIKEYYELKKEIEEYXXKGEELHEEWXQXKNRVEXRDILEYXEELXGQIINYNXLXNKVLLYFQLGLHYLLLDILGRLVGYTGIWERDAXLYQIAAMYXNGLPEYIXXKKNDKYKDGQIVGXKINXFKXDKKXLYNAGLELFENXNEHKNIXIRNYIAHFNYLSKAESSLLXYSENLRXLFSYDRKLKNAVXKSLINILLRHGMVLKFKFGTDKKSVXIRSXKKIXHLKSIAKKLYYPEVXVSKEYCKLVKXLLKYK

SEQ ID NO: 20 - protein, 15 aa, Artificial Sequence
  Synthetic
GGGGSGGGGSGGGGS

SEQ ID NO: 21 - DNA, 20 bp, Artificial Sequence
  Synthetic
gagtccgagcagaagaagaa

SEQ ID NO: 22 - DNA, 20 bp, Artificial Sequence
  Synthetic
gagtcctagcaggagaagaa

SEQ ID NO: 23 - DNA, 20 bp, Artificial Sequence
  Synthetic
gagtctaagcagaagaagaa

SEQ ID NO: 24 - protein, 12 aa, Artificial Sequence
  Synthetic
FWYHKMILVAGC

SEQ ID NO: 25 - protein, 12 aa, Artificial Sequence
  Synthetic
WYHKREDCSTNQ

SEQ ID NO: 26 - protein, 9 aa, Artificial Sequence
  Synthetic
VCAGSPTND

SEQ ID NO: 27 - protein, 4 aa, Artificial Sequence
  Synthetic
FWYH

SEQ ID NO: 28 - protein, 5 aa, Artificial Sequence
  Synthetic
HKRED

SEQ ID NO: 29 - RNA, 21 nt, Artificial Sequence
  Synthetic
gggaacaaagcgaagacaccc

SEQ ID NO: 30 - RNA, 12 nt, Artificial Sequence
  Synthetic
  misc_feature (1)..(1): /5Biosg/ biotin tag
  misc_feature (12)..(12): /3IAbRQSp/ Iowa black quencher
ucucguacguuc

SEQ ID NO: 31 - RNA, 24 nt, Artificial Sequence
  Synthetic
  misc_feature (1)..(1): /5Biosg/ biotin tag
  misc_feature (24)..(24): /3IAbRQSp/ Iowa black quencher
ucucguacguucucucguacguuc

SEQ ID NO: 32 - protein, 1115 aa, Fusobacterium necrophorum
MEKFRRQNRNSIIKIIISNYDTKGIKELKVRYRKQAQLDTFIIKTEIVNNDIFIKSIIEKAREKYRYSFLFDGEEKYHFKNKSSVEIVKKDIFSQTPDNMIRNYKITLKISEKNPRVVEAEIEDLMNSTILKDGRRSARREKSMTERKLIEEKVAKNYSLLANCPMEEVDSIKIYKIKRFLTYRSNMLLYFASINSFLCEGIKGKDNETEEIWHLKDNDVRKEKVRENFKNKLIQSTENYNSSLKNQIEEKEKLLRKEFKKGAFYRTIIKKLQQERIKELSEKSLTEDCEKIIKLYSKLRHSLMHYDYQYFENLFENKKNDDLMKDLNLDLFKSLPLIRKMKLNNKVNYLEDGDTLFVLQKTKKAKTLYQIYDALCEQKNGFNKFINDFFVSDGEENTVFKQIINEKFQSEMEFLEKRISESEKKNEKLKKKLDSMKAHFRNINSEDTKEAYFWDIHSSRNYKTKYNERKNLVNEYTELLGSSKEKKLLREEITKINRQLLKLKQEMEEITKKNSLFRLEYKMKIAFGFLFCEFDGNISKFKDEFDASNQEKIIQYHKNGEKYLTSFLKEEEKEKFNLEKMQKIIQKTEEEDWLLPETKNNLFKFYLLTYLLLPYELKGDFLGFVKKHYYDIKNVDFIDENQNNIQVSQTVEKQEDYFYHKIRLFEKNTKKYEIVKYSIVPNEKLKQYFEDLGIDIKYLTVEQKSEVSEEKNKKVSLKNNGMFNKTILLFVFKYYQIAFKLFNDIELYSLFFLREKSGKPLEIFRKELESKMKDGYLNFGQLLYVVYEVLVKNKDLDKILSKKIDYRKDKSFSPEIAYLRNFLSHLNYSKFLDNFMKINTNKSDENKEVLIPSIKIQKMIQFIEKCNLQNQIDFDFNFVNDFYMRKEKMFFIQLKQIFPDINSTEKQKMNEKEEILRNRYHLTDKKNEQIKDEHEAQSQLYEKILSLQKIYSSDKNNFYGRLKEEKLLFLEKQGKKKLSMEEIKDKIAGDISDLLGILKKEITRDIKDKLTEKFRYCEEKLLNLSFYNHQDKKKEESIRVFLIRDKNSDNFKFESILDDGSNKIFISKNGKEITIQCCDKVLETLIIEKNTLKISSNGKIISLIPHYSYSIDVKY

SEQ ID NO: 33 - protein, 1111 aa, Fusobacterium necrophorum
MEKFRRQNRSSIIKIIISNYDTKGIKELKVRYRKQAQLDTFIIKTEIVNNDIFIKSIIEKAREKYRYSFLFDGEEKYHFKNKSSVEIVKKDIFSQTPDNMIRNYKITLKISEKNPRVVEAEIEDLMNSTILKDGRRSARREKSMTERKLIEEKVAENYSLLANCPMEEVDSIKIYKIKRFLTYRSNMLLYFASINSFLCEGIKGKDNETEEIWHLKDNDVRKEKVKENFKNKLIQSTENYNSSLKNQIEEKEKLLRKESKKGAFYRTIIKKLQQERIKELSEKSLTEDCEKIIKLYSELRHPLMHYDYQYFENLFENKENSELTKNLNLDIFKSLPLVRKMKLNNKVNYLEDNDTLFVLQKTKKAKTLYQIYDALCEQKNGFNKFINDFFVSDGEENTVFKQIINEKFQSEIEFLEKRISESEKKNEKLKKKLDSMKAHFRNINSEDTKEAYFWDIHSSRNYKTKYNERKNLVNEYTELLGSSKEKKLLREEITKINRQLLKLKQEMEEITKKNSLFRLEYKMKMAFGFLFCEFDGNISRFKDEFDASNQEKIIQYHKNGEKYLTYFLKEEEKEKFNLKKLQETIQKTGEENWLLPQNKNNLFKFYLLTYLLLPYELKGDFLGFVKKHYYDIKNVDFMDENQSSKIIESKEDDFYHKIRLFEKNTKKYEIVKYSIVPDKKLKQYFKDLGIDTKYLILDQKSEVSGEKNKKVSLKNNGMFNKTILLFVFKYYQIAFKLFNDIELYSLFFLREKSGKPFEVFLKELKDKMIGKQLNFGQLLYVVYEVLVKNKDLSEILSERIDYRKDMCFSAEIADLRNFLSHLNYSKFLDNFMKINTNKSDENKEVLIPSIKIQKMIKFIEECNLQSQIDFDFNFVNDFYMRKEKMFFIQLKQIFPDINSTEKQKMNEKEEILRNRYHLTDKKNEQIKDEHEAQSQLYEKILSLQKIYSSDKNNFYGRLKEEKLLFLEKQEKKKLSMEEIKDKIAGDISDLLGILKKEITRDIKDKLTEKFRYCEEKLLNLSFYNHQDKKKEESIRVFLIRDKNSDNFKFESILDDGSNKIFISKNGKEITIQCCDKVLETLIIEKNTLKISSNGKIISLIPHYSYSIDVKY

SEQ ID NO: 34 - protein, 1110 aa, Fusobacterium necrophorum
MKVRYRKQAQLDTFIIKTEIVNNDIFIKSIIEKAREKYRYSFLFDGEEKYHFKNKSSVEIVKNDIFSQTPDNMIRNYKITLKISEKNPRVVEAEIEDLMNSTILKDGRRSARREKSMTERKLIEEKVAENYSLLANCPIEEVDSIKIYKIKRFLTYRSNMLLYFASINSFLCEGIKGKDNETEEIWHLKDNDVRKEKVKENFKNKLIQSTENYNSSLKNQIEEKEKLSSKEFKKGAFYRTIIKKLQQERIKELSEKSLTEDCEKIIKLYSELRHPLMHYDYQYFENLFENKENSELTKNLNLDIFKSLPLVRKMKLNNKVNYLEDNDTLFVLQKTKKAKTLYQIYDALCEQKNGFNKFINDFFVSDGEENTVFKQIINEKFQSEMEFLEKRISESEKKNEKLKKKLDSMKAHFRNINSEDTKEAYFWDIHSSRNYKTKYNERKNLVNEYTKLLGSSKEKKLLREEITKINRQLLKLKQEMEEITKKNSLFRLEYKMKIAFGFLFCEFDGNISKFKDEFDASNQEKIIQYHKNGEKYLTSFLKEEEKEKFNLEKMQKIIQKTEEEDWLLPETKNNLFKFYLLTYLLLPYELKGDFLGFVKKHYYDIKNVDFMDENQNNIQVSQTVEKQEDYFYHKIRLFEKNTKKYEIVKYSIVPNEKLKQYFEDLGIDIKYLTGSVESGEKWLGENLGIDIKYLTVEQKSEVSEEKNKKVSLKNNGMFNKTILLFVFKYYQIAFKLFNDIELYSLFFLREKSEKPFEVFLEELKDKMIGKQLNFGQLLYVVYEVLVKNKDLDKILSKKIDYRKDKSFSPEIAYLRNFLSHLNYSKFLDNFMKINTNKSDENKEVLIPSIKIQKMIQFIEKCNLQNQIDFDFNFVNDFYMRKEKMFFIQLKQIFPDINSTEKQKKSEKEEILRKRYHLINKKNEQIKDEHEAQSQLYEKILSLQKIFSCDKNNFYRRLKEEKLLFLEKQGKKKISMKEIKDKIASDISDLLGILKKEITRDIKDKLTEKFRYCEEKLLNISFYNHQDKKKEEGIRVFLIRDKNSDNFKFESILDDGSNKIFISKNGKEITIQCCDKVLETLMIEKNTLKISSNGKIISLIPHYSYSIDVKY

SEQ ID NO: 35 - protein, 668 aa, Fusobacterium necrophorum
MTEKKSIIFKNKSSVEIVKKDIFSQTPDNMIRNYKITLKISEKNPRVVEAEIEDLMNSTILKDGRRSARREKSMTERKLIEEKVAENYSLLANCPMEEVDSIKIYKIKRFLTYRSNMLLYFASINSFLCEGIKGKDNETEEIWHLKDNDVRKEKVKENFKNKLIQSTENYNSSLKNQIEEKEKLLRKESKKGAFYRTIIKKLQQERIKELSEKSLTEDCEKIIKLYSELRHPLMHYDYQYFENLFENKENSELTKNLNLDIFKSLPLVRKMKLNNKVNYLEDNDTLFVLQKTKKAKTLYQIYDALCEQKNGFNKFINDFFVSDGEENTVFKQIINEKFQSEMEFLEKRISESEKKNEKLKKKFDSMKAHFHNINSEDTKEAYFWDIHSSSNYKTKYNERKNLVNEYTELLGSSKEKKLLREEITQINRKLLKLKQEMEEITKKNSLFRLEYKMKIAFGFLFCEFDGNISKFKDEFDASNQEKIIQYHKNGEKYLTYFLKEEEKEKFNLEKMQKIIQKTEEEDWLLPETKNNLFKFYLLTYLLLPYELKGDFLGFVKKHYYDIKNVDFMDENQNNIQVSQTVEKQEDYFYHKIRLFEKNTKKYEIVKYSIVPNEKLKQYFEDLGIDIKYLTGSVESGEKWLGENLGIDIKYLTVEQKSEVSEEKIKKFL

SEQ ID NO: 36 - protein, 1121 aa, Fusobacterium perfoetens
MGKPNRSSIIKIIISNYDNKGIKEVKVRYNKQAQLDTFLIKSELKDGKFILYSIVDKAREKYRYSFEIDKTNINKNEILIIKKDIYSNKEDKVIRKYILSFEVSEKNDRTIVTKIKDCLETQKKEKFERENTRRLISETERKLLSEETQKTYSKIACCSPEDIDSVKIYKIKRYLAYRSNMLLFFSLINDIFVKGVVKDNGEEVGEIWRIIDSKEIDEKKTYDLLVENFKKRMSQEFINYKQSIENKIEKNTNKIKEIEQKLKKEKYKKEINRLKKQLIELNRENDLLEKDKIELSDEEIREDIEKILKIYSDLRHKLMHYNYQYFENLFENKKISKEKNEDVNLTELLDLNLFRYLPLVRQLKLENKTNYLEKEDKITVLGVSDSAIKYYSYYNFLCEQKNGFNNFINSFFSNDGEENKSFKEKINLSLEKEIEIMEKETNEKIKEINKNELQLMKEQKELGTAYVLDIHSLNDYKISHNERNKNVKLQNDIMNGNRDKNALDKINKKLVELKIKMDKITKRNSILRLKYKLQVAYGFLMEEYKGNIKKFKDEFDISKEKIKSYKSKGEKYLEVKSEKKYITKILNSIEDIHNITWLKNQEENNLFKFYVLTYILLPFEFRGDFLGFVKKHYYDIKNVEFLDENNDRLTPEQLEKMKNDSFFNKIRLFEKNSKKYDILKESILTSERIGKYFSLLNTGAKYFEYGGEENRGIFNKNIIIPIFKYYQIVLKLYNDVELAMLLTLSESDEKDINKIKELVTLKEKVSPKKIDYEKKYKFSVLLDCFNRIINLGKKDFLASEEVKEVAKTFTNLAYLRNKICHLNYSKFIDDLLTIDTNKSTTDSEGKLLINDRIRKLIKFIRENNQKMNISIDYNYINDYYMKKEKFIFGQRKQAKTIIDSGKKANKRNKAEELLKMYRVKKENINLIYELSKKLNELTKSELFLLDKKLLKDIDFTDVKIKNKSFFELKNDVKEVANIKQALQKHSSELIGIYKKEVIMAIKRSIVSKLIYDEEKVLSIIIYDKTNKKYEDFLLEIRRERDINKFQFLIDEKKEKLGYEKIIETKEKKKVVVKIQNNSELVSEPRIIKNKDKKKAKTPEEISKLGILDLTNHYCFNLKITL

SEQ ID NO: 37 - protein, 897 aa, Fusobacterium ulcerans
MENKGNNKKIDFDENYNILVAQIKEYFTKEIENYNNRIDNIIDKKELLKYSEKKEESEKNKKLEELNKLKSQKLKILTDEEIKADVIKIIKIFSDLRHSLMHYEYKYFENLFENKKNEELAELLNLNLFKNLTLLRQMKIENKTNYLEGREEFNIIGKNIKAKEVLGHYNLLAEQKNGFNNFINSFFVQDGTENLEFKKLIDEHFVNAKKRLERNIKKSKKLEKELEKMEQHYQRLNCAYVWDIHTSTTYKKLYNKRKSLIEEYNKQINEIKDKEVITAINVELLRIKKEMEEITKSNSLFRLKYKMQIAYAFLEIEFGGNIAKFKDEFDCSKMEEVQKYLKKGVKYLKYYKDKEAQKNYEFPFEEIFENKDTHNEEWLENTSENNLFKFYILTYLLLPMEFKGDFLGVVKKHYYDIKNVDFTDESEKELSQVQLDKMIGDSFFHKIRLFEKNTKRYEIIKYSILTSDEIKRYFRLLELDVPYFEYEKGTDEIGIFNKNIILTIFKYYQIIFRLYNDLEIHGLFNISSDLDKILRDLKSYGNKNINFREFLYVIKQNNNSSTEEEYRKIWENLEAKYLRLHLLTPEKEEIKTKTKEELEKLNEISNLRNGICHLNYKEIIEEILKTEISEKNKEATLNEKIRKVINFIKENELDKVELGFNFINDFFMKKEQFMFGQIKQVKEGNSDSITTERERKEKNNKKLKETYELNCDNLSEFYETSNNLRERANSSSLLEDSAFLKKIGLYKVKNNKVNSKVKDEEKRIENIKRKLLKDSSDIMGMYKAEVVKKLKEKLILIFKHDEEKRIYVTVYDTSKAVPENISKEILVKRNNSKEEYFFEDNNKKYVTEYYTLEITETNELKVIPAKKLEGKEFKTEKNKENKLMLNNHYCFNVKIIY

SEQ ID NO: 38 - protein, 1111 aa, Anaerosalibacter sp.
MKSGRREKAKSNKSSIVRVIISNFDDKQVKEIKVLYTKQGGIDVIKFKSTEKDEKGRMKFNFDCAYNRLEEEEFNSFGGKGKQSFFVTTNEDLTELHVTKRHKTTGEIIKDYTIQGKYTPIKQDRTKVTVSITDNKDHFDSNDLGDKIRLSRSLTQYTNRILLDADVMKNYREIVCSDSEKVDETINIDSQEIYKINRFLSYRSNMIIYYQMINNFLLHYDGEEDKGGNDSINLINEIWKYENKKNDEKEKIIERSYKSIEKSINQYILNHNTEVESGDKEKKIDISEERIKEDLKKTFILFSRLRHYMVHYNYKFYENLYSGKNFIIYNKDKSKSRRFSELLDLNIFKELSKIKLVKNRAVSNYLDKKTTIHVLNKNINAIKLLDIYRDICETKNGFNNFINNMMTISGEEDKEYKEMVTKHFNENMNKLSIYLENFKKHSDFKTNNKKKETYNLLKQELDEQKKLRLWFNAPYVYDIHSSKKYKELYVERKKYVDIHSKLIEAGINNDNKKKLNEINVKLCELNTEMKEMTKLNSKYRLQYKLQLAFGFILEEFNLDIDKFVSAFDKDNNLTISKFMEKRETYLSKSLDRRDNRFKKLIKDYKFRDTEDIFCSDRENNLVKLYILMYILLPVEIRGDFLGFVKKNYYDLKHVDFIDKRNNDNKDTFFHDLRLFEKNVKRLEVTSYSLSDGFLGKKSREKFGKELEKFIYKNVSIALPTNIDIKEFNKSLVLPMMKNYQIIFKLLNDIEISALFLIAKKEGNEGSITFKKVIDKVRKEDMNGNINFSQVMKMALNEKVNCQIRNSIAHINMKQLYIEPLNIYINNNQNKKTISEQMEEIIDICITKGLTGKELNKNIINDYYMKKEKLVFNLKLRKRNNLVSIDAQQKNMKEKSILNKYDLNYKDENLNIKEIILKVNDLNNKQKLLKETTEGESNYKNALSKDILLLNGIIRKNINFKIKEMILGIIQQNEYRYVNINIYDKIRKEDHNIDLKINNKYIEISCYENKSNESTDERINFKIKYMDLKVKNELLVPSCYEDIYIKKKIDLEIRYIENCKVVYIDIYYKKYNINLEFDGKTLFVKFNKDVKKNNQKVNLESNYIQNIKFIVS

SEQ ID NO: 39 - protein, 1340 aa, Lachnospiraceae bacterium
MQISKVNHKHVAVGQKDRERITGFIYNDPVGDEKSLEDVVAKRANDTKVLFNVFNTKDLYDSQESDKSEKDKEIISKGAKFVAKSFNSAITILKKQNKIYSTLTSQQVIKELKDKFGGARIYDDDIEEALTETLKKSFRKENVRNSIKVLIENAAGIRSSLSKDEEELIQEYFVKQLVEEYTKTKLQKNVVKSIKNQNMVIQPDSDSQVLSLSESRREKQSSAVSSDTLVNCKEKDVLKAFLTDYAVLDEDERNSLLWKLRNLVNLYFYGSESIRDYSYTKEKSVWKEHDEQKANKTLFIDEICHITKIGKNGKEQKVLDYEENRSRCRKQNINYYRSALNYAKNNTSGIFENEDSNHFWIHLIENEVERLYNGIENGEEFKFETGYISEKVWKAVINHLSIKYIALGKAVYNYAMKELSSPGDIEPGKIDDSYINGITSFDYEIIKAEESLQRDISMNVVFATNYLACATVDTDKDFLLFSKEDIRSCTKKDGNLCKNIMQFWGGYSTWKNFCEEYLKDDKDALELLYSLKSMLYSMRNSSFHFSTENVDNGSWDTELIGKLFEEDCNRAARIEKEKFYNNNLHMFYSSSLLEKVLERLYSSHHERASQVPSFNRVFVRKNFPSSLSEQRITPKFTDSKDEQIWQSAVYYLCKEIYYNDFLQSKEAYKLFREGVKNLDKNDINNQKAADSFKQAVVYYGKAIGNATLSQVCQAIMTEYNRQNNDGLKKKSAYAEKQNSNKYKHYPLFLKQVLQSAFWEYLDENKEIYGFISAQIHKSNVEIKAEDFIANYSSQQYKKLVDKVKKTPELQKWYTLGRLINPRQANQFLGSIRNYVQFVKDIQRRAKENGNPIRNYYEVLESDSIIKILEMCTKLNGTTSNDIHDYFRDEDEYAEYISQFVNFGDVHSGAALNAFCNSESEGKKNGIYYDGINPIVNRNWVLCKLYGSPDLISKIISRVNENMIHDFHKQEDLIREYQIKGICSNKKEQQDLRTFQVLKNRVELRDIVEYSEIINELYGQLIKWCYLRERDLMYFQLGFHYLCLNNASSKEADYIKINVDDRNISGAILYQIAAMYINGLPVYYKKDDMYVALKSGKKASDELNSNEQTSKKINYFLKYGNNILGDKKDQLYLAGLELFENVAEHENIIIFRNEIDHFHYFYDRDRSMLDLYSEVFDRFFTYDMKLRKNVVNMLYNILLDHNIVSSFVFETGEKKVGRGDSEVIKPSAKIRLRANNGVSSDVFTYKVGSKDELKIATLPAKNEEFLLNVARLIYYPDMEAVSENMVREGVVKVEKSNDKKGKISRGSNTRSSNQSKYNNKSKNRMNYSMGSIFEKMDLKFD

SEQ ID NO: 40 - protein, 1437 aa, Lachnospiraceae bacterium
MKISKVREENRGAKLTVNAKTAVVSENRSQEGILYNDPSRYGKSRKNDEDRDRYIESRLKSSGKLYRIFNEDKNKRETDELQWFLSEIVKKINRRNGLVLSDMLSVDDRAFEKAFEKYAELSYTNRRNKVSGSPAFETCGVDAATAERLKGIISETNFINRIKNNIDNKVSEDIIDRIIAKYLKKSLCRERVKRGLKKLLMNAFDLPYSDPDIDVQRDFIDYVLEDFYHVRAKSQVSRSIKNMNMPVQPEGDGKFAITVSKGGTESGNKRSAEKEAFKKFLSDYASLDERVRDDMLRRMRRLVVLYFYGSDDSKLSDVNEKFDVWEDHAARRVDNREFIKLPLENKLANGKTDKDAERIRKNTVKELYRNQNIGCYRQAVKAVEEDNNGRYFDDKMLNMFFIHRIEYGVEKIYANLKQVTEFKARTGYLSEKIWKDLINYISIKYIAMGKAVYNYAMDELNASDKKEIELGKISEEYLSGISSFDYELIKAEEMLQRETAVYVAFAARHLSSQTVELDSENSDFLLLKPKGTMDKNDKNKLASNNILNFLKDKETLRDTILQYFGGHSLWTDFPFDKYLAGGKDDVDFLTDLKDVIYSMRNDSFHYATENHNNGKWNKELISAMFEHETERMTVVMKDKFYSNNLPMFYKNDDLKKLLIDLYKDNVERASQVPSFNKVFVRKNFPALVRDKDNLGIELDLKADADKGENELKFYNALYYMFKEIYYNAFLNDKNVRERFITKATKVADNYDRNKERNLKDRIKSAGSDEKKKLREQLQNYIAENDFGQRIKNIVQVNPDYTLAQICQLIMTEYNQQNNGCMQKKSAARKDINKDSYQHYKMLLLVNLRKAFLEFIKENYAFVLKPYKHDLCDKADFVPDFAKYVKPYAGLISRVAGSSELQKWYIVSRFLSPAQANHMLGFLHSYKQYVWDIYRRASETGTEINHSIAEDKIAGVDITDVDAVIDLSVKLCGTISSEISDYFKDDEVYAEYISSYLDFEYDGGNYKDSLNRFCNSDAVNDQKVALYYDGEHPKLNRNIILSKLYGERRFLEKITDRVSRSDIVEYYKLKKETSQYQTKGIFDSEDEQKNIKKFQEMKNIVEFRDLMDYSEIADELQGQLINWIYLRERDLMNFQLGYHYACLNNDSNKQATYVTLDYQGKKNRKINGAILYQICAMYINGLPLYYVDKDSSEWTVSDGKESTGAKIGEFYRYAKSFENTSDCYASGLEIFENISEHDNITELRNYIEHFRYYSSFDRSFLGIYSEVFDRFFTYDLKYRKNVPTILYNILLQHFVNVRFEFVSGKKMIGIDKKDRKIAKEKECARITIREKNGVYSEQFTYKLKNGTVYVDARDKRYLQSIIRLLFYPEKVNMDEMIEVKEKKKPSDNNTGKGYSKRDRQQDRKEYDKYKEKKKKEGNFLSGMGGNINWDEINAQLKN

SEQ ID NO: 41 - protein, 1385 aa, Clostridium aminophilum
MKFSKVDHTRSAVGIQKATDSVHGMLYTDPKKQEVNDLDKRFDQLNVKAKRLYNVFNQSKAEEDDDEKRFGKVVKKLNRELKDLLFHREVSRYNSIGNAKYNYYGIKSNPEEIVSNLGMVESLKGERDPQKVISKLLLYYLRKGLKPGTDGLRMILEASCGLRKLSGDEKELKVFLQTLDEDFEKKTFKKNLIRSIENQNMAVQPSNEGDPIIGITQGRFNSQKNEEKSAIERMMSMYADLNEDHREDVLRKLRRLNVLYFNVDTEKTEEPTLPGEVDTNPVFEVWHDHEKGKENDRQFATFAKILTEDRETRKKEKLAVKEALNDLKSAIRDHNIMAYRCSIKVTEQDKDGLFFEDQRINRFWIHHIESAVERILASINPEKLYKLRIGYLGEKVWKDLLNYLSIKYIAVGKAVFHFAMEDLGKTGQDIELGKLSNSVSGGLTSFDYEQIRADETLQRQLSVEVAFAANNLFRAVVGQTGKKIEQSKSEENEEDFLLWKAEKIAESIKKEGEGNTLKSILQFFGGASSWDLNHFCAAYGNESSALGYETKFADDLRKAIYSLRNETFHFTTLNKGSFDWNAKLIGDMFSHEAATGIAVERTRFYSNNLPMFYRESDLKRIMDHLYNTYHPRASQVPSFNSVFVRKNFRLFLSNTLNTNTSFDTEVYQKWESGVYYLFKEIYYNSFLPSGDAHHLFFEGLRRIRKEADNLPIVGKEAKKRNAVQDFGRRCDELKNLSLSAICQMIMTEYNEQNNGNRKVKSTREDKRKPDIFQHYKMLLLRTLQEAFAIYIRREEFKFIFDLPKTLYVMKPVEEFLPNWKSGMFDSLVERVKQSPDLQRWYVLCKFLNGRLLNQLSGVIRSYIQFAGDIQRRAKANHNRLYMDNTQRVEYYSNVLEVVDFCIKGTSRFSNVFSDYFRDEDAYADYLDNYLQFKDEKIAEVSSFAALKTFCNEEEVKAGIYMDGENPVMQRNIVMAKLFGPDEVLKNVVPKVTREEIEEYYQLEKQIAPYRQNGYCKSEEDQKKLLRFQRIKNRVEFQTITEFSEIINELLGQLISWSFLRERDLLYFQLGFHYLCLHNDTEKPAEYKEISREDGTVIRNAILHQVAAMYVGGLPVYTLADKKLAAFEKGEADCKLSISKDTAGAGKKIKDFFRYSKYVLIKDRMLTDQNQKYTIYLAGLELFENTDEHDNITDVRKYVDHFKYYATSDENAMSILDLYSEIHDRFFTYDMKYQKNVANMLENILLRHFVLIRPEFFTGSKKVGEGKKITCKARAQIEIAENGMRSEDFTYKLSDGKKNISTCMIAARDQKYLNTVARLLYYPHEAKKSIVDTREKKNNKKTNRGDGTFNKQKGTARKEKDNGPREFNDTGFSNTPFAGFDPFRNS

SEQ ID NO: 42 - protein, 1175 aa, Carnobacterium gallinarum
MRITKVKIKLDNKLYQVTMQKEEKYGTLKLNEESRKSTAEILRLKKASFNKSFHSKTINSQKENKNATIKKNGDYISQIFEKLVGVDTNKNIRKPKMSLTDLKDLPKKDLALFIKRKFKNDDIVEIKNLDLISLFYNALQKVPGEHFTDESWADFCQEMMPYREYKNKFIERKIILLANSIEQNKGFSINPETFSKRKRVLHQWAIEVQERGDFSILDEKLSKLAEIYNFKKMCKRVQDELNDLEKSMKKGKNPEKEKEAYKKQKNFKIKTIWKDYPYKTHIGLIEKIKENEELNQFNIEIGKYFEHYFPIKKERCTEDEPYYLNSETIATTVNYQLKNALISYLMQIGKYKQFGLENQVLDSKKLQEIGIYEGFQTKFMDACVFATSSLKNIIEPMRSGDILGKREFKEAIATSSFVNYHHFFPYFPFELKGMKDRESELIPFGEQTEAKQMQNIWALRGSVQQIRNEIFHSFDKNQKFNLPQLDKSNFEFDASENSTGKSQSYIETDYKFLFEAEKNQLEQFFIERIKSSGALEYYPLKSLEKLFAKKEMKFSLGSQVVAFAPSYKKLVKKGHSYQTATEGTANYLGLSYYNRYELKEESFQAQYYLLKLIYQYVFLPNFSQGNSPAFRETVKAILRINKDEARKKMKKNKKFLRKYAFEQVREMEFKETPDQYMSYLQSEMREEKVRKAEKNDKGFEKNITMNFEKLLMQIFVKGFDVFLTTFAGKELLLSSEEKVIKETEISLSKKINEREKTLKASIQVEHQLVATNSAISYWLFCKLLDSRHLNELRNEMIKFKQSRIKFNHTQHAELIQNLLPIVELTILSNDYDEKNDSQNVDVSAYFEDKSLYETAPYVQTDDRTRVSFRPILKLEKYHTKSLIEALLKDNPQFRVAATDIQEWMHKREEIGELVEKRKNLHTEWAEGQQTLGAEKREEYRDYCKKIDRFNWKANKVTLTYLSQLHYLITDLLGRMVGFSALFERDLVYFSRSFSELGGETYHISDYKNLSGVLRLNAEVKPIKIKNIKVIDNEENPYKGNEPEVKPFLDRLHAYLENVIGIKAVHGKIRNQTAHLSVLQLELSMIESMNNLRDLMAYDRKLKNAVTKSMIKILDKHGMILKLKIDENHKNFEIESLIPKEIIHLKDKAIKTNQVSEEYCQLVLALLTTNPGNQLN

SEQ ID NO: 43 - protein, 1164 aa, Carnobacterium gallinarum
MRMTKVKINGSPVSMNRSKLNGHLVWNGTTNTVNILTKKEQSFAASFLNKTLVKADQVKGYKVLAENIFIIFEQLEKSNSEKPSVYLNNIRRLKEAGLKRFFKSKYHEEIKYTSEKNQSVPTKLNLIPLFFNAVDRIQEDKFDEKNWSYFCKEMSPYLDYKKSYLNRKKEILANSIQQNRGFSMPTAEEPNLLSKRKQLFQQWAMKFQESPLIQQNNFAVEQFNKEFANKINELAAVYNVDELCTAITEKLMNFDKDKSNKTRNFEIKKLWKQHPHNKDKALIKLFNQEGNEALNQFNIELGKYFEHYFPKTGKKESAESYYLNPQTIIKTVGYQLRNAFVQYLLQVGKLHQYNKGVLDSQTLQEIGMYEGFQTKFMDACVFASSSLRNIIQATTNEDILTREKFKKELEKNVELKHDLFFKTEIVEERDENPAKKIAMTPNELDLWAIRGAVQRVRNQIFHQQINKRHEPNQLKVGSFENGDLGNVSYQKTIYQKLFDAEIKDIEIYFAEKIKSSGALEQYSMKDLEKLFSNKELTLSLGGQVVAFAPSYKKLYKQGYFYQNEKTIELEQFTDYDFSNDVFKANYYLIKLIYHYVFLPQFSQANNKLFKDTVHYVIQQNKELNTTEKDKKNNKKIRKYAFEQVKLMKNESPEKYMQYLQREMQEERTIKEAKKTNEEKPNYNFEKLLIQIFIKGFDTFLRNFDLNLNPAEELVGTVKEKAEGLRKRKERIAKILNVDEQIKTGDEEIAFWIFAKLLDARHLSELRNEMIKFKQSSVKKGLIKNGDLIEQMQPILELCILSNDSESMEKESFDKIEVFLEKVELAKNEPYMQEDKLTPVKFRFMKQLEKYQTRNFIENLVIENPEFKVSEKIVLNWHEEKEKIADLVDKRTKLHEEWASKAREIEEYNEKIKKNKSKKLDKPAEFAKFAEYKIICEAIENFNRLDHKVRLTYLKNLHYLMIDLMGRMVGFSVLFERDFVYMGRSYSALKKQSIYLNDYDTFANIRDWEVNENKHLFGTSSSDLTFQETAEFKNLKKPMENQLKALLGVTNHSFEIRNNIAHLHVLRNDGKGEGVSLLSCMNDLRKLMSYDRKLKNAVTKAIIKILDKHGMILKLTNNDHTKPFEIESLKPKKIIHLEKSNHSFPMDQVSQEYCDLVKKMLVFTN

SEQ ID NO: 44 - protein, 1154 aa, Paludibacter propionicigenes
MRVSKVKVKDGGKDKMVLVHRKTTGAQLVYSGQPVSNETSNILPEKKRQSFDLSTLNKTIIKFDTAKKQKLNVDQYKIVEKIFKYPKQELPKQIKAEEILPFLNHKFQEPVKYWKNGKEESFNLTLLIVEAVQAQDKRKLQPYYDWKTWYIQTKSDLLKKSIENNRIDLTENLSKRKKALLAWETEFTASGSIDLTHYHKVYMTDVLCKMLQDVKPLTDDKGKINTNAYHRGLKKALQNHQPAIFGTREVPNEANRADNQLSIYHLEVVKYLEHYFPIKTSKRRNTADDIAHYLKAQTLKTTIEKQLVNAIRANIIQQGKTNHHELKADTTSNDLIRIKTNEAFVLNLTGTCAFAANNIRNMVDNEQTNDILGKGDFIKSLLKDNTNSQLYSFFFGEGLSTNKAEKETQLWGIRGAVQQIRNNVNHYKKDALKTVFNISNFENPTITDPKQQTNYADTIYKARFINELEKIPEAFAQQLKTGGAVSYYTIENLKSLLTTFQFSLCRSTIPFAPGFKKVFNGGINYQNAKQDESFYELMLEQYLRKENFAEESYNARYFMLKLIYNNLFLPGFTTDRKAFADSVGFVQMQNKKQAEKVNPRKKEAYAFEAVRPMTAADSIADYMAYVQSELMQEQNKKEEKVAEETRINFEKFVLQVFIKGFDSFLRAKEFDFVQMPQPQLTATASNQQKADKLNQLEASITADCKLTPQYAKADDATHIAFYVFCKLLDAAHLSNLRNELIKFRESVNEFKFHHLLEIIEICLLSADVVPTDYRDLYSSEADCLARLRPFIEQGADITNWSDLFVQSDKHSPVIHANIELSVKYGTTKLLEQIINKDTQFKTTEANFTAWNTAQKSIEQLIKQREDHHEQWVKAKNADDKEKQERKREKSNFAQKFIEKHGDDYLDICDYINTYNWLDNKMHFVHLNRLHGLTIELLGRMAGFVALFDRDFQFFDEQQIADEFKLHGFVNLHSIDKKLNEVPTKKIKEIYDIRNKIIQINGNKINESVRANLIQFISSKRNYYNNAFLHVSNDEIKEKQMYDIRNHIAHFNYLTKDAADFSLIDLINELRELLHYDRKLKNAVSKAFIDLFDKHGMILKLKLNADHKLKVESLEPKKIYHLGSSAKDKPEYQYCTNQVMMAYCNMCRSLLEMKK

SEQ ID NO: 45 - protein, 970 aa, Listeria weihenstephanensis
MLALLHQEVPSQKLHNLKSLNTESLTKLFKPKFQNMISYPPSKGAEHVQFCLTDIAVPAIRDLDEIKPDWGIFFEKLKPYTDWAESYIHYKQTTIQKSIEQNKIQSPDSPRKLVLQKYVTAFLNGEPLGLDLVAKKYKLADLAESFKVVDLNEDKSANYKIKACLQQHQRNILDELKEDPELNQYGIEVKKYIQRYFPIKRAPNRSKHARADFLKKELIESTVEQQFKNAVYHYVLEQGKMEAYELTDPKTKDLQDIRSGEAFSFKFINACAFASNNLKMILNPECEKDILGKGDFKKNLPNSTTQSDVVKKMIPFFSDEIQNVNFDEAIWAIRGSIQQIRNEVYHCKKHSWKSILKIKGFEFEPNNMKYTDSDMQKLMDKDIAKIPDFIEEKLKSSGIIRFYSHDKLQSIWEMKQGFSLLTTNAPFVPSFKRVYAKGHDYQTSKNRYYDLGLTTFDILEYGEEDFRARYFLTKLVYYQQFMPWFTADNNAFRDAANFVLRLNKNRQQDAKAFINIREVEEGEMPRDYMGYVQGQIAIHEDSTEDTPNHFEKFISQVFIKGFDSHMRSADLKFIKNPRNQGLEQSEIEEMSFDIKVEPSFLKNKDDYIAFWTFCKMLDARHLSELRNEMIKYDGHLTGEQEIIGLALLGVDSRENDWKQFFSSEREYEKIMKGYVGEELYQREPYRQSDGKTPILFRGVEQARKYGTETVIQRLFDASPEFKVSKCNITEWERQKETIEETIERRKELHNEWEKNPKKPQNNAFFKEYKECCDAIDAYNWHKNKTTLVYVNELHHLLIEILGRYVGYVAIADRDFQCMANQYFKHSGITERVEYWGDNRLKSIKKLDTFLKKEGLFVSEKNARNHIAHLNYLSLKSECTLLYLSERLREIFKYDRKLKNAVSKSLIDILDRHGMSVVFANLKENKHRLVIKSLEPKKLRHLGEKKIDNGYIETNQVSEEYCGIVKRLLEI

SEQ ID NO: 46 - protein, 1051 aa, Listeriaceae bacterium
MKITKMRVDGRTIVMERTSKEGQLGYEGIDGNKTTEIIFDKKKESFYKSILNKTVRKPDEKEKNRRKQAINKAINKEITELMLAVLHQEVPSQKLHNLKSLNTESLTKLFKPKFQNMISYPPSKGAEHVQFCLTDIAVPAIRDLDEIKPDWGIFFEKLKPYTDWAESYIHYKQTTIQKSIEQNKIQSPDSPRKLVLQKYVTAFLNGEPLGLDLVAKKYKLADLAESFKLVDLNEDKSANYKIKACLQQHQRNILDELKEDPELNQYGIEVKKYIQRYFPIKRAPNRSKHARADFLKKELIESTVEQQFKNAVYHYVLEQGKMEAYELTDPKTKDLQDIRSGEAFSFKFINACAFASNNLKMILNPECEKDILGKGNFKKNLPNSTTRSDVVKKMIPFFSDELQNVNFDEAIWAIRGSIQQIRNEVYHCKKHSWKSILKIKGFEFEPNNMKYADSDMQKLMDKDIAKIPEFIEEKLKSSGVVRFYRHDELQSIWEMKQGFSLLTTNAPFVPSFKRVYAKGHDYQTSKNRYYNLDLTTFDILEYGEEDFRARYFLTKLVYYQQFMPWFTADNNAFRDAANFVLRLNKNRQQDAKAFINIREVEEGEMPRDYMGYVQGQIAIHEDSIEDTPNHFEKFISQVFIKGFDRHMRSANLKFIKNPRNQGLEQSEIEEMSFDIKVEPSFLKNKDDYIAFWIFCKMLDARHLSELRNEMIKYDGHLTGEQEIIGLALLGVDSRENDWKQFFSSEREYEKIMKGYVVEELYQREPYRQSDGKTPILFRGVEQARKYGTETVIQRLFDANPEFKVSKCNLAEWERQKETIEETIKRRKELHNEWAKNPKKPQNNAFFKEYKECCDAIDAYNWHKNKTTLAYVNELHHLLIEILGRYVGYVAIADRDFQCMANQYFKHSGITERVEYWGDNRLKSIKKLDTFLKKEGLFVSEKNARNHIAHLNYLSLKSECTLLYLSERLREIFKYDRKLKNAVSKSLIDILDRHGMSVVFANLKENKHRLVIKSLEPKKLRHLGGKKIDGGYIETNQVSEEYCGIVKRLLEM

SEQ ID NO: 47 - protein, 1152 aa, Leptotrichia wadei
MKVTKVDGISHKKYIEEGKLVKSTSEENRTSERLSELLSIRLDIYIKNPDNASEEENRIRRENLKKFFSNKVLHLKDSVLYLKNRKEKNAVQDKNYSEEDISEYDLKNKNSFSVLKKILLNEDVNSEELEIFRKDVEAKLNKINSLKYSFEENKANYQKINENNVEKVGGKSKRNIIYDYYRESAKRNDYINNVQEAFDKLYKKEDIEKLFFLIENSKKHEKYKIREYYHKIIGRKNDKENFAKIIYEEIQNVNNIKELIEKIPDMSELKKSQVFYKYYLDKEELNDKNIKYAFCHFVEIEMSQLLKNYVYKRLSNISNDKIKRIFEYQNLKKLIENKLLNKLDTYVRNCGKYNYYLQVGEIATSDFIARNRQNEAFLRNIIGVSSVAYFSLRNILETENENDITGRMRGKTVKNNKGEEKYVSGEVDKIYNENKQNEVKENLKMFYSYDFNMDNKNEIEDFFANIDEAISSIRHGIVHFNLELEGKDIFAFKNIAPSEISKKMFQNEINEKKLKLKIFKQLNSANVFNYYEKDVIIKYLKNTKFNFVNKNIPFVPSFTKLYNKIEDLRNTLKFFWSVPKDKEEKDAQIYLLKNIYYGEFLNKFVKNSKVFFKITNEVIKINKQRNQKTGHYKYQKFENIEKTVPVEYLAIIQSREMINNQDKEEKNTYIDFIQQIFLKGFIDYLNKNNLKYIESNNNNDNNDIFSKIKIKKDNKEKYDKILKNYEKHNRNKEIPHEINEFVREIKLGKILKYTENLNMFYLILKLLNHKELTNLKGSLEKYQSANKEETFSDELELINLLNLDNNRVTEDFELEANEIGKFLDFNENKIKDRKELKKFDTNKIYFDGENIIKHRAFYNIKKYGMLNLLEKIADKAKYKISLKELKEYSNKKNEIEKNYTMQQNLHRKYARPKKDEKFNDEDYKEYEKAIGNIQKYTHLKNKVEFNELNLLQGLLLKILHRLVGYTSIWERDLRFRLKGEFPENHYIEEIFNFDNSKNVKYKSGQIVEKYINFYKELYKDNVEKRSIYSDKKVKKLKQEKKDLYIRNYIAHFNYIPHAEISLLEVLENLRKLLSYDRKLKNAIMKSIVDILKEYGFVATFKIGADKKIEIQTLESEKIVHLKNLKKKKLMTDRNSEELCELVKVMFEYKALE

SEQ ID NO: 48 - protein, 1285 aa, Rhodobacter capsulatus
MQIGKVQGRTISEFGDPAGGLKRKISTDGKNRKELPAHLSSDPKALIGQWISGIDKIYRKPDSRKSDGKAIHSPTPSKMQFDARDDLGEAFWKLVSEAGLAQDSDYDQFKRRLHPYGDKFQPADSGAKLKFEADPPEPQAFHGRWYGAMSKRGNDAKELAAALYEHLHVDEKRIDGQPKRNPKTDKFAPGLVVARALGIESSVLPRGMARLARNWGEEEIQTYFVVDVAASVKEVAKAAVSAAQAFDPPRQVSGRSLSPKVGFALAEHLERVTGSKRCSFDPAAGPSVLALHDEVKKTYKRLCARGKNAARAFPADKTELLALMRHTHENRVRNQMVRMGRVSEYRGQQAGDLAQSHYWTSAGQTEIKESEIFVRLWVGAFALAGRSMKAWIDPMGKIVNTEKNDRDLTAAVNIRQVISNKEMVAEAMARRGIYFGETPELDRLGAEGNEGFVFALLRYLRGCRNQTFHLGARAGFLKEIRKELEKTRWGKAKEAEHVVLTDKTVAAIRAIIDNDAKALGARLLADLSGAFVAHYASKEHFSTLYSEIVKAVKDAPEVSSGLPRLKLLLKRADGVRGYVHGLRDTRKHAFATKLPPPPAPRELDDPATKARYIALLRLYDGPFRAYASGITGTALAGPAARAKEAATALAQSVNVTKAYSDVMEGRTSRLRPPNDGETLREYLSALTGETATEFRVQIGYESDSENARKQAEFIENYRRDMLAFMFEDYIRAKGFDWILKIEPGATAMTRAPVLPEPIDTRGQYEHWQAALYLVMHFVPASDVSNLLHQLRKWEALQGKYELVQDGDATDQADARREALDLVKRFRDVLVLFLKTGEARFEGRAAPFDLKPFRALFANPATFDRLFMATPTTARPAEDDPEGDGASEPELRVARTLRGLRQIARYNHMAVLSDLFAKHKVRDEEVARLAEIEDETQEKSQIVAAQELRTDLHDKVMKCHPKTISPEERQSYAAAIKTIEEHRFLVGRVYLGDHLRLHRLMMDVIGRLIDYAGAYERDTGTFLINASKQLGAGADWAVTIAGAANTDARTQTRKDLAHFNVLDRADGTPDLTALVNRAREMMAYDRKRKNAVPRSILDMLARLGLTLKWQMKDHLLQDATITQAAIKHLDKVRLTVGGPAAVTEARFSQDYLQMVAAVFNGSVQNPKPRRRDDGDAWHKPPKPATAQSQPDQKPPNKAPSAGSRLPPPQVGEVYEGVVVKVIDTGSLGFLAVEGVAGNIGLHISRLRRIREDAIIVGRRYRFRVEIYVPPKSNTSKLNAADLVRID

SEQ ID NO: 49 - protein, 1285 aa, Rhodobacter capsulatus
MQIGKVQGRTISEFGDPAGGLKRKISTDGKNRKELPAHLSSDPKALIGQWISGIDKIYRKPDSRKSDGKAIHSPTPSKMQFDARDDLGEAFWKLVSEAGLAQDSDYDQFKRRLHPYGDKFQPADSGAKLKFEADPPEPQAFHGRWYGAMSKRGNDAKELAAALYEHLHVDEKRIDGQPKRNPKTDKFAPGLVVARALGIESSVLPRGMARLARNWGEEEIQTYFVVDVAASVKEVAKAAVSAAQAFDPPRQVSGRSLSPKVGFALAEHLERVTGSKRCSFDPAAGPSVLALHDEVKKTYKRLCARGKNAARAFPADKTELLALMRHTHENRVRNQMVRMGRVSEYRGQQAGDLAQSHYWTSAGQTEIKESEIFVRLWVGAFALAGRSMKAWIDPMGKIVNTEKNDRDLTAAVNIRQVISNKEMVAEAMARRGIYFGETPELDRLGAEGNEGFVFALLRYLRGCRNQTFHLGARAGFLKEIRKELEKTRWGKAKEAEHVVLTDKTVAAIRAIIDNDAKALGARLLADLSGAFVAHYASKEHFSTLYSEIVKAVKDAPEVSSGLPRLKLLLKRADGVRGYVHGLRDTRKHAFATKLPPPPAPRELDDPATKARYIALLRLYDGPFRAYASGITGTALAGPAARAKEAATALAQSVNVTKAYSDVMEGRSSRLRPPNDGETLREYLSALTGETATEFRVQIGYESDSENARKQAEFIENYRRDMLAFMFEDYIRAKGFDWILKIEPGATAMTRAPVLPEPIDTRGQYEHWQAALYLVMHFVPASDVSNLLHQLRKWEALQGKYELVQDGDATDQADARREALDLVKRFRDVLVLFLKTGEARFEGRAAPFDLKPFRALFANPATFDRLFMATPTTARPAEDDPEGDGASEPELRVARTLRGLRQIARYNHMAVLSDLFAKHKVRDEEVARLAEIEDETQEKSQIVAAQELRTDLHDKVMKCHPKTISPEERQSYAAAIKTIEEHRFLVGRVYLGDHLRLHRLMMDVIGRLIDYAGAYERDTGTFLINASKQLGAGADWAVTIAGAANTDARTQTRKDLAHFNVLDRADGTPDLTALVNRAREMMAYDRKRKNAVPRSILDMLARLGLTLKWQMKDHLLQDATITQAAIKHLDKVRLTVGGPAAVTEARFSQDYLQMVAAVFNGSVQNPKPRRRDDGDAWHKPPKPATAQSQPDQKPPNKAPSAGSRLPPPQVGEVYEGVVVKVIDTGSLGFLAVEGVAGNIGLHISRLRRIREDAIIVGRRYRFRVEIYVPPKSNTSKLNAADLVRID

SEQ ID NO: 50 - protein, 1285 aa, Rhodobacter capsulatus; identical to SEQ ID NO: 49

SEQ ID NO: 51 - protein, 1389 aa, Artificial Sequence
  Synthetic
MGNLFGHKRWYEVRDKKDFKIKRKVKVKRNYDGNKYILNINENNNKEKIDNNKFIRKYINYKKNDNILKEFTRKFHAGNILFKLKGKEGIIRIENNDDFLETEEVVLYIEAYGKSEKLKALGITKKKIIDEAIRQGITKDDKKIEIKRQENEEEIEIDIRDEYTNKTLNDCSIILRIIENDELETKKSIYEIFKNINMSLYKIIEKIIENETEKVFENRYYEEHLREKLLKDDKIDVILTNFMEIREKIKSNLEILGFVKFYLNVGGDKKKSKNKKMLVEKILNINVDLTVEDIADFVIKELEFWNITKRIEKVKKVNNEFLEKRRNRTYIKSYVLLDKHEKFKIERENKKDKIVKFFVENIKNNSIKEKIEKILAEFKIDELIKKLEKELKKGNCDTEIFGIFKKHYKVNFDSKKFSKKSDEEKELYKIIYRYLKGRIEKILVNEQKVRLKKMEKIEIEKILNESILSEKILKRVKQYTLEHIMYLGKLRHNDIDMTTVNTDDFSRLHAKEELDLELITFFASTNMELNKIFSRENINNDENIDFFGGDREKNYVLDKKILNSKIKIIRDLDFIDNKNNITNNFIRKFTKIGTNERNRILHAISKERDLQGTQDDYNKVINIIQNLKISDEEVSKALNLDVVFKDKKNIITKINDIKISEENNNDIKYLPSFSKVLPEILNLYRNNPKNEPFDTIETEKIVLNALIYVNKELYKKLILEDDLEENESKNIFLQELKKTLGNIDEIDENIIENYYKNAQISASKGNNKAIKKYQKKVIECYIGYLRKNYEELFDFSDFKMNIQEIKKQIKDINDNKTYERITVKTSDKTIVINDDFEYIISIFALLNSNAVINKIRNRFFATSVWLNTSEYQNIIDILDEIMQLNTLRNECITENWNLNLEEFIQKMKEIEKDFDDFKIQTKKEIFNNYYEDIKNNILTEFKDDINGCDVLEKKLEKIVIFDDETKFEIDKKSNILQDEQRKLSNINKKDLKKKVDQYIKDKDQEIKSKILCRIIFNSDFLKKYKKEIDNLIEDMESENENKFQEIYYPKERKNELYIYKKNLFLNIGNPNFDKIYGLISNDIKMADAKFLFNIDGKNIRKNKISEIDAILKNLNDKLNGYSKEYKEKYIKKLKENDDFFAKNIQNKNYKSFEKDYNRVSEYKKIRDLVEFNYLNKIESYLIDINWKLAIQMARFERDMHYIVNGLRELGIIKLSGYNTGISRAYPKRNGSDGFYTTTAYYKFFDEESYKKFEKICYGFGIDLSENSEINKPENESIRNYISHFYIVRNPFADYSIAEQIDRVSNLLSYSTRYNNSTYASVFEVFKKDVNLDYDELKKKFKLIGNNDILERLMKPKKVSVLELESYNSDYIKNLIIELLTKIENTNDTL

SEQ ID NO: 52 - protein, 1197 aa, L. wadei
MKVTKVDGISHKKYIEEGKLVKSTSEENRTSERLSELLSIRLDIYIKNPDNASEEENRIRRENLKKFFSNKVLHLKDSVLYLKNRKEKNAVQDKNYSEEDISEYDLKNKNSFSVLKKILLNEDVNSEELEIFRKDVEAKLNKINSLKYSFEENKANYQKINENNVEKVGGKSKRNIIYDYYRESAKRNDYINNVQEAFDKLYKKEDIEKLFFLIENSKKHEKYKIREYYHKIIGRKNDKENFAKIIYEEIQNVNNIKELIEKIPDMSELKKSQVFYKYYLDKEELNDKNIKYAFCHFVEIEMSQLLKNYVYKRLSNISNDKIKRIFEYQNLKKLIENKLLNKLDTYVRNCGKYNYYLQVGEIATSDFIARNRQNEAFLRNIIGVSSVAYFSLRNILETENENDITGRMRGKTVKNNKGEEKYVSGEVDKIYNENKQNEVKENLKMFYSYDFNMDNKNEIEDFFANIDEAISSIRHGIVHFNLELEGKDIFAFKNIAPSEISKKMFQNEINEKKLKLKIFKQLNSANVFNYYEKDVIIKYLKNTKFNFVNKNIPFVPSFTKLYNKIEDLRNTLKFFWSVPKDKEEKDAQIYLLKNIYYGEFLNKFVKNSKVFFKITNEVIKINKQRNQKTGHYKYQKFENIEKTVPVEYLAIIQSREMINNQDKEEKNTYIDFIQQIFLKGFIDYLNKNNLKYIESNNNNDNNDIFSKIKIKKDNKEKYDKILKNYEKHNRNKEIPHEINEFVREIKLGKILKYTENLNMFYLILKLLNHKELTNLKGSLEKYQSANKEETFSDELELINLLNLDNNRVTEDFELEANEIGKFLDFNENKIKDRKELKKFDTNKIYFDGENIIKHRAFYNIKKYGMLNLLEKIADKAKYKISLKELKEYSNKKNEIEKNYTMQQNLHRKYARPKKDEKFNDEDYKEYEKAIGNIQKYTHLKNKVEFNELNLLQGLLLKILHRLVGYTSIWERDLRFRLKGEFPENHYIEEIFNFDNSKNVKYKSGQIVEKYINFYKELYKDNVEKRSIYSDKKVKKLKQEKKDLYIRNYIAHFNYIPHAEISLLEVLENLRKLLSYDRKLKNAIMKSIVDILKEYGFVATFKIGADKKIEIQTLESEKIVHLKNLKKKKLMTDRNSEELCELVKVMFEYKALEKRPAATKKAGQAKKKKGSYPYDVPDYAYPYDVPDYAYPYDVPDYA

SEQ ID NO: 53 - protein, 1120 aa, Listeria seeligeri
MWISIKTLIHHLGVLFFCDYMYNRREKKIIEVKTMRITKVEVDRKKVLISRDKNGGKLVYENEMQDNTEQIMHHKKSSFYKSVVNKTICRPEQKQMKKLVHGLLQENSQEKIKVSDVTKLNISNFLNHRFKKSLYYFPENSPDKSEEYRIEINLSQLLEDSLKKQQGTFICWESFSKDMELYINWAENYISSKTKLIKKSIRNNRIQSTESRSGQLMDRYMKDILNKNKPFDIQSVSEKYQLEKLTSALKATFKEAKKNDKEINYKLKSTLQNHERQIIEELKENSELNQFNIEIRKHLETYFPIKKTNRKVGDIRNLEIGEIQKIVNHRLKNKIVQRILQEGKLASYEIESTVNSNSLQKIKIEEAFALKFINACLFASNNLRNMVYPVCKKDILMIGEFKNSFKEIKHKKFIRQWSQFFSQEITVDDIELASWGLRGAIAPIRNEIIHLKKHSWKKFFNNPTFKVKKSKIINGKTKDVTSEFLYKETLFKDYFYSELDSVPELIINKMESSKILDYYSSDQLNQVFTIPNFELSLLTSAVPFAPSFKRVYLKGFDYQNQDEAQPDYNLKLNIYNEKAFNSEAFQAQYSLFKMVYYQVFLPQFTTNNDLFKSSVDFILTLNKERKGYAKAFQDIRKMNKDEKPSEYMSYIQSQLMLYQKKQEEKEKINHFEKFINQVFIKGFNSFIEKNRLTYICHPTKNTVPENDNIEIPFHTDMDDSNIAFWLMCKLLDAKQLSELRNEMIKFSCSLQSTEEISTFTKAREVIGLALLNGEKGCNDWKELFDDKEAWKKNMSLYVSEELLQSLPYTQEDGQTPVINRSIDLVKKYGTETILEKLFSSSDDYKVSAKDIAKLHEYDVTEKIAQQESLHKQWIEKPGLARDSAWTKKYQNVINDISNYQWAKTKVELTQVRHLHQLTIDLLSRLAGYMSIADRDFQFSSNYILERENSEYRVTSWILLSENKNKNKYNDYELYNLKNASIKVSSKNDPQLKVDLKQLRLTLEYLELFDNRLKEKRNNISHFNYLNGQLGNSILELFDDARDVLSYDRKLKNAVSKSLKEILSSHGMEVTFKPLYQTNHHLKIDKLQPKKIHHLGEKSTVSSNQVSNEYCQLVRTLLTMK

SEQ ID NO: 54 - protein, 1159 aa, Leptotrichia buccalis
MKVTKVGGISHKKYTSEGRLVKSESEENRTDERLSALLNMRLDMYIKNPSSTETKENQKRIGKLKKFFSNKMVYLKDNTLSLKNGKKENIDREYSETDILESDVRDKKNFAVLKKIYLNENVNSEELEVFRNDIKKKLNKINSLKYSFEKNKANYQKINENNIEKVEGKSKRNIIYDYYRESAKRDAYVSNVKEAFDKLYKEEDIAKLVLEIENLTKLEKYKIREFYHEIIGRKNDKENFAKIIYEEIQNVNNMKELIEKVPDMSELKKSQVFYKYYLDKEELNDKNIKYAFCHFVEIEMSQLLKNYVYKRLSNISNDKIKRIFEYQNLKKLIENKLLNKLDTYVRNCGKYNYYLQDGEIATSDFIARNRQNEAFLRNIIGVSSVAYFSLRNILETENENDITGRMRGKTVKNNKGEEKYVSGEVDKIYNENKKNEVKENLKMFYSYDFNMDNKNEIEDFFANIDEAISSIRHGIVHFNLELEGKDIFAFKNIAPSEISKKMFQNEINEKKLKLKIFRQLNSANVFRYLEKYKILNYLKRTRFEFVNKNIPFVPSFTKLYSRIDDLKNSLGIYWKTPKTNDDNKTKEIIDAQIYLLKNIYYGEFLNYFMSNNGNFFEISKEIIELNKNDKRNLKTGFYKLQKFEDIQEKIPKEYLANIQSLYMINAGNQDEEEKDTYIDFIQKIFLKGFMTYLANNGRLSLIYIGSDEETNTSLAEKKQEFDKFLKKYEQNNNIKIPYEINEFLREIKLGNILKYTERLNMFYLILKLLNHKELTNLKGSLEKYQSANKEEAFSDQLELINLLNLDNNRVTEDFELEADEIGKFLDFNGNKVKDNKELKKFDTNKIYFDGENIIKHRAFYNIKKYGMLNLLEKIADKAGYKISIEELKKYSNKKNEIEKNHKMQENLHRKYARPRKDEKFTDEDYESYKQAIENIEEYTHLKNKVEFNELNLLQGLLLRILHRLVGYTSIWERDLRFRLKGEFPENQYIEEIFNFENKKNVKYKGGQIVEKYIKFYKELHQNDEVKINKYSSANIKVLKQEKKDLYIRNYIAHFNYIPHAEISLLEVLENLRKLLSYDRKLKNAVMKSVVDILKEYGFVATFKIGADKKIGIQTLESEKIVHLKNLKKKKLMTDRNSEELCKLVKIMFEYKMEEKKSEN

SEQ ID NO: 55 - protein, 1285 aa, Herbinix hemicellulosilytica
MKLTRRRISGNSVDQKITAAFYRDMSQGLLYYDSEDNDCTDKVIESMDFERSWRGRILKNGEDDKNPFYMFVKGLVGSNDKIVCEPIDVDSDPDNLDILINKNLTGFGRNLKAPDSNDTLENLIRKIQAGIPEEEVLPELKKIKEMIQKDIVNRKEQLLKSIKNNRIPFSLEGSKLVPSTKKMKWLFKLIDVPNKTFNEKMLEKYWEIYDYDKLKANITNRLDKTDKKARSISRAVSEELREYHKNLRTNYNRFVSGDRPAAGLDNGGSAKYNPDKEEFLLFLKEVEQYFKKYFPVKSKHSNKSKDKSLVDKYKNYCSYKVVKKEVNRSIINQLVAGLIQQGKLLYYFYYNDTWQEDFLNSYGLSYIQVEEAFKKSVMTSLSWGINRLTSFFIDDSNTVKFDDITTKKAKEAIESNYFNKLRTCSRMQDHFKEKLAFFYPVYVKDKKDRPDDDIENLIVLVKNAIESVSYLRNRTFHFKESSLLELLKELDDKNSGQNKIDYSVAAEFIKRDIENLYDVFREQIRSLGIAEYYKADMISDCFKTCGLEFALYSPKNSLMPAFKNVYKRGANLNKAYIRDKGPKETGDQGQNSYKALEEYRELTWYIEVKNNDQSYNAYKNLLQLIYYHAFLPEVRENEALITDFINRTKEWNRKETEERLNTKNNKKHKNFDENDDITVNTYRYESIPDYQGESLDDYLKVLQRKQMARAKEVNEKEEGNNNYIQFIRDVVVWAFGAYLENKLKNYKNELQPPLSKENIGLNDTLKELFPEEKVKSPFNIKCRFSISTFIDNKGKSTDNTSAEAVKTDGKEDEKDKKNIKRKDLLCFYLFLRLLDENEICKLQHQFIKYRCSLKERRFPGNRTKLEKETELLAELEELMELVRFTMPSIPEISAKAESGYDTMIKKYFKDFIEKKVFKNPKTSNLYYHSDSKTPVTRKYMALLMRSAPLHLYKDIFKGYYLITKKECLEYIKLSNIIKDYQNSLNELHEQLERIKLKSEKQNGKDSLYLDKKDFYKVKEYVENLEQVARYKHLQHKINFESLYRIFRIHVDIAARMVGYTQDWERDMHFLFKALVYNGVLEERRFEAIFNNNDDNNDGRIVKKIQNNLNNKNRELVSMLCWNKKLNKNEFGAIIWKRNPIAHLNHFTQTEQNSKSSLESLINSLRILLAYDRKRQNAVTKTINDLLLNDYHIRIKWEGRVDEGQIYFNIKEKEDIENEPIIHLKHLHKKDCYIYKNSYMFDKQKEWICNGIKEEVYDKSILKCIGNLFKFDYEDKNKSSANPKHT

SEQ ID NO: 56 - protein, 1344 aa, Eubacterium rectale
MLRRDKEVKKLYNVFNQIQVGTKPKKWNNDEKLSPEENERRAQQKNIKMKNYKWREACSKYVESSQRIINDVIFYSYRKAKNKLRYMRKNEDILKKMQEAEKLSKFSGGKLEDFVAYTLRKSLVVSKYDTQEFDSLAAMVVFLECIGKNNISDHEREIVCKLLELIRKDFSKLDPNVKGSQGANIVRSVRNQNMIVQPQGDRFLFPQVYAKENETVTNKNVEKEGLNEFLLNYANLDDEKRAESLRKLRRILDVYFSAPNHYEKDMDITLSDNIEKEKFNVWEKHECGKKETGLFVDIPDVLMEAEAENIKLDAVVEKRERKVLNDRVRKQNIICYRYTRAVVEKYNSNEPLFFENNAINQYWIHHIENAVERILKNCKAGKLFKLRKGYLAEKVWKDAINLISIKYIALGKAVYNFALDDIWKDKKNKELGIVDERIRNGITSFDYEMIKAHENLQRELAVDIAFSVNNLARAVCDMSNLGNKESDFLLWKRNDIADKLKNKDDMASVSAVLQFFGGKSSWDINIFKDAYKGKKKYNYEVRFIDDLRKAIYCARNENFHFKTALVNDEKWNTELFGKIFERETEFCLNVEKDRFYSNNLYMFYQVSELRNMLDHLYSRSVSRAAQVPSYNSVIVRTAFPEYITNVLGYQKPSYDADTLGKWYSACYYLLKEIYYNSFLQSDRALQLFEKSVKTLSWDDKKQQRAVDNFKDHFSDIKSACTSLAQVCQIYMTEYNQQNNQIKKVRSSNDSIFDQPVYQHYKVLLKKAIANAFADYLKNNKDLFGFIGKPFKANEIREIDKEQFLPDWTSRKYEALCIEVSGSQELQKWYIVGKFLNARSLNLMVGSMRSYIQYVTDIKRRAASIGNELHVSVHDVEKVEKWVQVIEVCSLLASRTSNQFEDYFNDKDDYARYLKSYVDFSNVDMPSEYSALVDFSNEEQSDLYVDPKNPKVNRNIVHSKLFAADHILRDIVEPVSKDNIEEFYSQKAEIAYCKIKGKEITAEEQKAVLKYQKLKNRVELRDIVEYGEIINELLGQLINWSFMRERDLLYFQLGFHYDCLRNDSKKPEGYKNIKVDENSIKDAILYQIIGMYVNGVTVYAPEKDGDKLKEQCVKGGVGVKVSAFHRYSKYLGLNEKTLYNAGLEIFEVVAEHEDIINLRNGIDHFKYYLGDYRSMLSIYSEVFDRFFTYDIKYQKNVLNLLQNILLRHNVIVEPILESGFKTIGEQTKPGAKLSIRSIKSDTFQYKVKGGTLITDAKDERYLETIRKILYYAENEEDNLKKSVVVTNADKYEKNKESDDQNKQKEKKNKDNKGKKNEETKSDAEKNNNERLSYNPFANLNFKLSN

SEQ ID NO: 57 - protein, 1373 aa, Eubacteriaceae bacterium
MKISKESHKRTAVAVMEDRVGGVVYVPGGSGIDLSNNLKKRSMDTKSLYNVFNQIQAGTAPSEYEWKDYLSEAENKKREAQKMIQKANYELRRECEDYAKKANLAVSRIIFSKKPKKIFSDDDIISHMKKQRLSKFKGRMEDFVLIALRKSLVVSTYNQEVFDSRKAATVFLKNIGKKNISADDERQIKQLMALIREDYDKWNPDKDSSDKKESSGTKVIRSIEHQNMVIQPEKNKLSLSKISNVGKKTKTKQKEKAGLDAFLKEYAQIDENSRMEYLKKLRRLLDTYFAAPSSYIKGAAVSLPENINFSSELNVWERHEAAKKVNINFVEIPESLLNAEQNNNKINKVEQEHSLEQLRTDIRRRNITCYHFANALAADERYHTLFFENMAMNQFWIHHMENAVERILKKCNVGTLFKLRIGYLSEKVWKDMLNLLSIKYIALGKAVYHFALDDIWKADIWKDASDKNSGKINDLTLKGISSFDYEMVKAQEDLQREMAVGVAFSTNNLARVTCKMDDLSDAESDFLLWNKEAIRRHVKYTEKGEILSAILQFFGGRSLWDESLFEKAYSDSNYELKFLDDLKRAIYAARNETFHFKTAAIDGGSWNTRLFGSLFEKEAGLCLNVEKNKFYSNNLVLFYKQEDLRVFLDKLYGKECSRAAQIPSYNTILPRKSFSDFMKQLLGLKEPVYGSAILDQWYSACYYLFKEVYYNLFLQDSSAKALFEKAVKALKGADKKQEKAVESFRKRYWEISKNASLAEICQSYITEYNQQNNKERKVRSANDGMFNEPIYQHYKMLLKEALKMAFASYIKNDKELKFVYKPTEKLFEVSQDNFLPNWNSEKYNTLISEVKNSPDLQKWYIVGKFMNARMLNLLLGSMRSYLQYVSDIQKRAAGLGENQLHLSAENVGQVKKWIQVLEVCLLLSVRISDKFTDYFKDEEEYASYLKEYVDFEDSAMPSDYSALLAFSNEGKIDLYVDASNPKVNRNIIQAKLYAPDMVLKKVVKKISQDECKEFNEKKEQIMQFKNKGDEVSWEEQQKILEYQKLKNRVELRDLSEYGELINELLGQLINWSYLRERDLLYFQLGFHYSCLMNESKKPDAYKTIRRGTVSIENAVLYQIIAMYINGFPVYAPEKGELKPQCKTGSAGQKIRAFCQWASMVEKKKYELYNAGLELFEVVKEHDNIIDLRNKIDHFKYYQGNDSILALYGEIFDRFFTYDMKYRNNVLNHLQNILLRHNVIIKPIISKDKKEVGRGKMKDRAAFLLEEVSSDRFTYKVKEGERKIDAKNRLYLETVRDILYFPNRAVNDKGEDVIICSKKAQDLNEKKADRDKNHDKSKDTNQKKEGKNQEEKSENKEPYSDRMTWKPFAGIKLE

SEQ ID NO: 58 - protein, 1276 aa, Blautia sp.
MKISKVDHVKSGIDQKLSSQRGMLYKQPQKKYEGKQLEEHVRNLSRKAKALYQVFPVSGNSKMEKELQIINSFIKNILLRLDSGKTSEEIVGYINTYSVASQISGDHIQELVDQHLKESLRKYTCVGDKRIYVPDIIVALLKSKFNSETLQYDNSELKILIDFIREDYLKEKQIKQIVHSIENNSTPLRIAEINGQKRLIPANVDNPKKSYIFEFLKEYAQSDPKGQESLLQHMRYLILLYLYGPDKITDDYCEEIEAWNFGSIVMDNEQLFSEEASMLIQDRIYVNQQIEEGRQSKDTAKVKKNKSKYRMLGDKIEHSINESVVKHYQEACKAVEEKDIPWIKYISDHVMSVYSSKNRVDLDKLSLPYLAKNTWNTWISFIAMKYVDMGKGVYHFAMSDVDKVGKQDNLIIGQIDPKFSDGISSFDYERIKAEDDLHRSMSGYIAFAVNNFARAICSDEFRKKNRKEDVLTVGLDEIPLYDNVKRKLLQYFGGASNWDDSIIDIIDDKDLVACIKENLYVARNVNFHFAGSEKVQKKQDDILEEIVRKETRDIGKHYRKVFYSNNVAVFYCDEDIIKLMNHLYQREKPYQAQIPSYNKVISKTYLPDLIFMLLKGKNRTKISDPSIMNMFRGTFYFLLKEIYYNDFLQASNLKEMFCEGLKNNVKNKKSEKPYQNFMRRFEELENMGMDFGEICQQIMTDYEQQNKQKKKTATAVMSEKDKKIRTLDNDTQKYKHFRTLLYIGLREAFIIYLKDEKNKEWYEFLREPVKREQPEEKEFVNKWKLNQYSDCSELILKDSLAAAWYVVAHFINQAQLNHLIGDIKNYIQFISDIDRRAKSTGNPVSESTEIQIERYRKILRVLEFAKFFCGQITNVLTDYYQDENDFSTHVGHYVKFEKKNMEPAHALQAFSNSLYACGKEKKKAGFYYDGMNPIVNRNITLASMYGNKKLLENAMNPVTEQDIRKYYSLMAELDSVLKNGAVCKSEDEQKNLRHFQNLKNRIELVDVLTLSELVNDLVAQLIGWVYIRERDMMYLQLGLHYIKLYFTDSVAEDSYLRTLDLEEGSIADGAVLYQIASLYSFNLPMYVKPNKSSVYCKKHVNSVATKFDIFEKEYCNGDETVIENGLRLFENINLHKDMVKFRDYLAHFKYFAKLDESILELYSKAYDFFFSYNIKLKKSVSYVLTNVLLSYFINAKLSFSTYKSSGNKTVQHRTTKISVVAQTDYFTYKLRSIVKNKNGVESIENDDRRCEVVNIAARDKEFVDEVCNVINYNSDK

SEQ ID NO: 59 - protein, 1385 aa, Leptotrichia sp.
MGNLFGHKRWYEVRDKKDFKIKRKVKVKRNYDGNKYILNINENNNKEKIDNNKFIGEFVNYKKNNNVLKEFKRKFHAGNILFKLKGKEEIIRIENNDDFLETEEVVLYIEVYGKSEKLKALEITKKKIIDEAIRQGITKDDKKIEIKRQENEEEIEIDIRDEYTNKTLNDCSIILRIIENDELETKKSIYEIFKNINMSLYKIIEKIIENETEKVFENRYYEEHLREKLLKDNKIDVILTNFMEIREKIKSNLEIMGFVKFYLNVSGDKKKSENKKMFVEKILNTNVDLTVEDIVDFIVKELKFWNITKRIEKVKKFNNEFLENRRNRTYIKSYVLLDKHEKFKIERENKKDKIVKFFVENIKNNSIKEKIEKILAEFKINELIKKLEKELKKGNCDTEIFGIFKKHYKVNFDSKKFSNKSDEEKELYKIIYRYLKGRIEKILVNEQKVRLKKMEKIEIEKILNESILSEKILKRVKQYTLEHIMYLGKLRHNDIVKMTVNTDDFSRLHAKEELDLELITFFASTNMELNKIFNGKEKVTDFFGFNLNGQKITLKEKVPSFKLNILKKLNFINNENNIDEKLSHFYSFQKEGYLLRNKILHNSYGNIQETKNLKGEYENVEKLIKELKVSDEEISKSLSLDVIFEGKVDIINKINSLKIGEYKDKKYLPSFSKIVLEITRKFREINKDKLFDIESEKIILNAVKYVNKILYEKITSNEENEFLKTLPDKLVKKSNNKKENKNLLSIEEYYKNAQVSSSKGDKKAIKKYQNKVTNAYLEYLENTFTEIIDFSKFNLNYDEIKTKIEERKDNKSKIIIDSISTNINITNDIEYIISIFALLNSNTYINKIRNRFFATSVWLEKQNGTKEYDYENIISILDEVLLINLLRENNITDILDLKNAIIDAKIVENDETYIKNYIFESNEEKLKKRLFCEELVDKEDIRKIFEDENFKFKSFIKKNEIGNFKINFGILSNLECNSEVEAKKIIGKNSKKLESFIQNIIDEYKSNIRTLFSSEFLEKYKEEIDNLVEDTESENKNKFEKIYYPKEHKNELYIYKKNLFLNIGNPNFDKIYGLISKDIKNVDTKILFDDDIKKNKISEIDAILKNLNDKLNGYSNDYKAKYVNKLKENDDFFAKNIQNENYSSFGEFEKDYNKVSEYKKIRDLVEFNYLNKIESYLIDINWKLAIQMARFERDMHYIVNGLRELGIIKLSGYNTGISRAYPKRNGSDGFYTTTAYYKFFDEESYKKFEKICYGFGIDLSENSEINKPENESIRNYISHFYIVRNPFADYSIAEQIDRVSNLLSYSTRYNNSTYASVFEVFKKDVNLDYDELKKKFRLIGNNDILERLMKPKKVSVLELESYNSDYIKNLIIELLTKIENTNDTL

SEQ ID NO: 60 - protein, 1334 aa, Lachnospiraceae bacterium
MKISKVDHTRMAVAKGNQHRRDEISGILYKDPTKTGSIDFDERFKKLNCSAKILYHVFNGIAEGSNKYKNIVDKVNNNLDRVLFTGKSYDRKSIIDIDTVLRNVEKINAFDRISTEEREQIIDDLLEIQLRKGLRKGKAGLREVLLIGAGVIVRTDKKQEIADFLEILDEDFNKTNQAKNIKLSIENQGLVVSPVSRGEERIFDVSGAQKGKSSKKAQEKEALSAFLLDYADLDKNVRFEYLRKIRRLINLYFYVKNDDVMSLTEIPAEVNLEKDFDIWRDHEQRKEENGDFVGCPDILLADRDVKKSNSKQVKIAERQLRESIREKNIKRYRFSIKTIEKDDGTYFFANKQISVFWIHRIENAVERILGSINDKKLYRLRLGYLGEKVWKDILNFLSIKYIAVGKAVFNFAMDDLQEKDRDIEPGKISENAVNGLTSFDYEQIKADEMLQREVAVNVAFAANNLARVTVDIPQNGEKEDILLWNKSDIKKYKKNSKKGILKSILQFFGGASTWNMKMFEIAYHDQPGDYEENYLYDIIQIIYSLRNKSFHFKTYDHGDKNWNRELIGKMIEHDAERVISVEREKFHSNNLPMFYKDADLKKILDLLYSDYAGRASQVPAFNTVLVRKNFPEFLRKDMGYKVHFNNPEVENQWHSAVYYLYKEIYYNLFLRDKEVKNLFYTSLKNIRSEVSDKKQKLASDDFASRCEEIEDRSLPEICQIIMTEYNAQNFGNRKVKSQRVIEKNKDIFRHYKMLLIKTLAGAFSLYLKQERFAFIGKATPIPYETTDVKNFLPEWKSGMYASFVEEIKNNLDLQEWYIVGRFLNGRMLNQLAGSLRSYIQYAEDIERRAAENRNKLFSKPDEKIEACKKAVRVLDLCIKISTRISAEFTDYFDSEDDYADYLEKYLKYQDDAIKELSGSSYAALDHFCNKDDLKFDIYVNAGQKPILQRNIVMAKLFGPDNILSEVMEKVTESAIREYYDYLKKVSGYRVRGKCSTEKEQEDLLKFQRLKNAVEFRDVTEYAEVINELLGQLISWSYLRERDLLYFQLGFHYMCLKNKSFKPAEYVDIRRNNGTIIHNAILYQIVSMYINGLDFYSCDKEGKTLKPIETGKGVGSKIGQFIKYSQYLYNDPSYKLEIYNAGLEVFENIDEHDNITDLRKYVDHFKYYAYGNKMSLLDLYSEFFDRFFTYDMKYQKNVVNVLENILLRHFVIFYPKFGSGKKDVGIRDCKKERAQIEISEQSLTSEDFMFKLDDKAGEEAKKFPARDERYLQTIAKLLYYPNEIEDMNRFMKKGETINKKVQFNRKKKITRKQKNNSSNEVLSSTMGYLFKNIKL

SEQ ID NO: 61 - protein, 500 aa, Chloroflexus aggregans
MTDQVRREEVAAGELADTPLAAAQTPAADAAVAATPAPAEAVAPTPEQAVDQPATTGESEAPVTTAQAAAHEAEPAEATGASFTPVSEQQPQKPRRLKDLQPGMELEGKVTSIALYGIFVDVGVGRDGLVHISEMSDRRIDTPSELVQIGDTVKVWVKSVDLDARRISLTMLNPSRGEKPRRSRQSQPAQPQPRRQEVDREKLASLKVGEIVEGVITGFAPFGAFADIGVGKDGLIHISELSEGRVEKPEDAVKVGERYQFKVLEIDGEGTRISLSLRRAQRTQRMQQLEPGQIIEGTVSGIATFGAFVDIGVGRDGLVHISALAPHRVAKVEDVVKVGDKVKVKVLGVDPQSKRISLTMRLEEEQPATTAGDEAAEPAEEVTPTRRGNLERFAAAAQTARERSERGERSERGERRERRERRPAQSSPDTYIVGEDDDESFEGNATIEDLLTKFGGSSSRRDRDRRRRHEDDDDEEMERPSNRRQREAIRRTLQQIGYDE

SEQ ID NO: 62 - protein, 249 aa, Demequina aurantiaca
MDLTWHALLILFIVALLAGFLDTLAGGGGLLTVPALLLTGIPPLQALGTNKLQSSFGTGMATYQVIRKKRVHWRDVRWPMVWAFLGSAAGAVAVQFIDTDALLIIIPVVLALVAAYFLFVPKSHLPPPEPRMSDPAYEATLVPIIGAYDGAFGPGTGSLYALSGVALRAKTLVQSTAIAKTLNFATNFAALLVFAFAGHMLWTVGAVMIAGQLIGAYAGSHMLFRVNPLVLRVLIVVMSLGMLIRVLLD

SEQ ID NO: 63 - protein, 1235 aa, Thalassospira sp.
MRIIKPYGRSHVEGVATQEPRRKLRLNSSPDISRDIPGFAQSHDALIIAQWISAIDKIATKPKPDKKPTQAQINLRTTLGDAAWQHVMAENLLPAATDPAIREKLHLIWQSKIAPWGTARPQAEKDGKPTPKGGWYERFCGVLSPEAITQNVARQIAKDIYDHLHVAAKRKGREPAKQGESSNKPGKFKPDRKRGLIEERAESIAKNALRPGSHAPCPWGPDDQATYEQAGDVAGQIYAAARDCLEEKKRRSGNRNTSSVQYLPRDLAAKILYAQYGRVFGPDTTIKAALDEQPSLFALHKAIKDCYHRLINDARKRDILRILPRNMAALFRLVRAQYDNRDINALIRLGKVIHYHASEQGKSEHHGIRDYWPSQQDIQNSRFWGSDGQADIKRHEAFSRIWRHIIALASRTLHDWADPHSQKFSGENDDILLLAKDAIEDDVFKAGHYERKCDVLFGAQASLFCGAEDFEKAILKQAITGTGNLRNATFHFKGKVRFEKELQELTKDVPVEVQSAIAALWQKDAEGRTRQIAETLQAVLAGHFLTEEQNRHIFAALTAAMAQPGDVPLPRLRRVLARHDSICQRGRILPLSPCPDRAKLEESPALTCQYTVLKMLYDGPFRAWLAQQNSTILNHYIDSTIARTDKAARDMNGRKLAQAEKDLITSRAADLPRLSVDEKMGDFLARLTAATATEMRVQRGYQSDGENAQKQAAFIGQFECDVIGRAFADFLNQSGFDFVLKLKADTPQPDAAQCDVTALIAPDDISVSPPQAWQQVLYFILHLVPVDDASHLLHQIRKWQVLEGKEKPAQIAHDVQSVLMLYLDMHDAKFTGGAALHGIEKFAEFFAHAADFRAVFPPQSLQDQDRSIPRRGLREIVRFGHLPLLQHMSGTVQITHDNVVAWQAARTAGATGMSPIARRQKQREELHALAVERTARFRNADLQNYMHALVDVIKHRQLSAQVTLSDQVRLHRLMMGVLGRLVDYAGLWERDLYFVVLALLYHHGATPDDVFKGQGKKNLADGQVVAALKPKNRKAAAPVGVFDDLDHYGIYQDDRQSIRNGLSHFNMLRGGKAPDLSHWVNQTRSLVAHDRKLKNAVAKSVIEMLAREGFDLDWGIQTDRGQHILSHGKIRTRQAQHFQKSRLHIVKKSAKPDKNDTVKIRENLHGDAMVERVVQLFAAQVQKRYDITVEKRLDHLFLKPQDQKGKNGIHTHNGWSKTEKKRRPSRENRKGNHEN

SEQ ID NO: 64 - protein, 1312 aa, Pseudobutyrivibrio sp.
MKFSKESHRKTAVGVTESNGIIGLLYKDPLNEKEKIEDVVNQRANSTKRLFNLFGTEATSKDISRASKDLAKVVNKAIGNLKGNKKFNKKEQITKGLNTKIIVEELKNVLKDEKKLIVNKDIIDEACSRLLKTSFRTAKTKQAVKMILTAVLIENTNLSKEDEAFVHEYFVKKLVNEYNKTSVKKQIPVALSNQNMVIQPNSVNGTLEISETKKSKETKTTEKDAFRAFLRDYATLDENRRHKMRLCLRNLVNLYFYGETSVSKDDFDEWRDHEDKKQNDELFVKKIVSIKTDRKGNVKEVLDVDATIDAIRTNNIACYRRALAYANENPDVFFSDTMLNKFWIHHVENEVERIYGHINNNTGDYKYQLGYLSEKVWKGIINYLSIKYIAEGKAVYNYAMNALAKDNNSNAFGKLDEKFVNGITSFEYERIKAEETLQRECAVNIAFAANHLANATVDLNEKDSDFLLLKHEDNKDTLGAVARPNILRNILQFFGGKSRWNDFDFSGIDEIQLLDDLRKMIYSLRNSSFHFKTENIDNDSWNTKLIGDMFAYDFNMAGNVQKDKMYSNNVPMFYSTSDIEKMLDRLYAEVHERASQVPSFNSVFVRKNFPDYLKNDLKITSAFGVDDALKWQSAVYYVCKEIYYNDFLQNPETFTMLKDYVQCLPIDIDKSMDQKLKSERNAHKNFKEAFATYCKECDSLSAICQMIMTEYNNQNKGNRKVISARTKDGDKLIYKHYKMILFEALKNVFTIYLEKNINTYGFLKKPKLINNVPAIEEFLPNYNGRQYETLVNRITEETELQKWYIVGRLLNPKQVNQLIGNFRSYVQYVNDVARRAKQTGNNLSNDNIAWDVKNIIQIFDVCTKLNGVTSNILEDYFDDGDDYARYLKNFVDYTNKNNDHSATLLGDFCAKEIDGIKIGIYHDGTNPIVNRNIIQCKLYGATGIISDLTKDGSILSVDYEIIKKYMQMQKEIKVYQQKGICKTKEEQQNLKKYQELKNIVELRNIIDYSEILDELQGQLINWGYLRERDLMYFQLGFHYLCLHNESKKPVGYNNAGDISGAVLYQIVAMYTNGLSLIDANGKSKKNAKASAGAKVGSFCSYSKEIRGVDKDTKEDDDPIYLAGVELFENINEHQQCINLRNYIEHFHYYAKHDRSMLDLYSEVFDRFFTYDMKYTKNVPNMMYNILLQHLVVPAFEFGSSEKRLDDNDEQTKPRAMFTLREKNGLSSEQFTYRLGDGNSTVKLSARGDDYLRAVASLLYYPDRAPEGLIRDAEAEDKFAKINHSNPKSDNRNNRGNFKNPKVQWYNNKTKRK

SEQ ID NO: 65 - protein, 1343 aa, Butyrivibrio sp.
MKISKVDHRKTAVKITDNKGAEGFIYQDPTRDSSTMEQIISNRARSSKVLFNIFGDTKKSKDLNKYTESLIIYVNKAIKSLKGDKRNNKYEEITESLKTERVLNALIQAGNEFTCSENNIEDALNKYLKKSFRVGNTKSALKKLLMAAYCGYKLSIEEKEEIQNYFVDKLVKEYNKDTVLKYTAKSLKHQNMVVQPDTDNHVFLPSRIAGATQNKMSEKEALTEFLKAYAVLDEEKRHNLRIILRKLVNLYFYESPDFIYPENNEWKEHDDRKNKTETFVSPVKVNEEKNGKTFVKIDVPATKDLIRLKNIECYRRSVAETAGNPITYFTDHNISKFWIHHIENEVEKIFALLKSNWKDYQFSVGYISEKVWKEIINYLSIKYIAIGKAVYNYALEDIKKNDGTLNFGVIDPSFYDGINSFEYEKIKAEETFQREVAVYVSFAVNHLSSATVKLSEAQSDMLVLNKNDIEKIAYGNTKRNILQFFGGQSKWKEFDFDRYINPVNYTDIDFLFDIKKMVYSLRNESFHFTTTDTESDWNKNLISAMFEYECRRISTVQKNKFFSNNLPLFYGENSLERVLHKLYDDYVDRMSQVPSFGNVFVRKKFPDYMKEIGIKHNLSSEDNLKLQGALYFLYKEIYYNAFISSEKAMKIFVDLVNKLDTNARDDKGRITHEAMAHKNFKDAISHYMTHDCSLADICQKIMTEYNQQNTGHRKKQTTYSSEKNPEIFRHYKMILFMLLQKAMTEYISSEEIFDFIMKPNSPKTDIKEEEFLPQYKSCAYDNLIKLIADNVELQKWYITARLLSPREVNQLIGSFRSYKQFVSDIERRAKETNNSLSKSGMTVDVENITKVLDLCTKLNGRFSNELTDYFDSKDDYAVYVSKFLDFGFKIDEKFPAALLGEFCNKEENGKKIGIYHNGTEPILNSNIIKSKLYGITDVVSRAVKPVSEKLIREYLQQEVKIKPYLENGVCKNKEEQAALRKYQELKNRIEFRDIVEYSEIINELMGQLINFSYLRERDLMYFQLGFHYLCLNNYGAKPEGYYSIVNDKRTIKGAILYQIVAMYTYGLPIYHYVDGTISDRRKNKKTVLDTLNSSETVGAKIKYFIYYSDELFNDSLILYNAGLELFENINEHENIVNLRKYIDHFKYYVSQDRSLLDIYSEVFDRYFTYDRKYKKNVMNLFSNIMLKHFIITDFEFSTGEKTIGEKNTAKKECAKVRIKRGGLSSDKFTYKFKDAKPIELSAKNTEFLDGVARILYYPENVVLTDLVRNSEVEDEKRIEKYDRNHNSSPTRKDKTYKQDVKKNYNKKTSKAFDSSKLDTKSVGNNLSDNPVLKQFLSESKKKR

SEQ ID NO: 66 - protein, 1276 aa, Blautia sp.; identical to SEQ ID NO: 58

SEQ ID NO: 67 - protein, 1168 aa, Leptotrichia sp.
MKITKIDGISHKKYIKEGKLVKSTSEENKTDERLSELLTIRLDTYIKNPDNASEEENRIRRENLKEFFSNKVLYLKDGILYLKDRREKNQLQNKNYSEEDISEYDLKNKNNFLVLKKILLNEDINSEELEIFRNDFEKKLDKINSLKYSLEENKANYQKINENNIKKVEGKSKRNIFYNYYKDSAKRNDYINNIQEAFDKLYKKEDIENLFFLIENSKKHEKYKIRECYHKIIGRKNDKENFATIIYEEIQNVNNMKELIEKVPNVSELKKSQVFYKYYLNKEKLNDENIKYVFCHFVEIEMSKLLKNYVYKKPSNISNDKVKRIFEYQSLKKLIENKLLNKLDTYVRNCGKYSFYLQDGEIATSDFIVGNRQNEAFLRNIIGVSSTAYFSLRNILETENENDITGRMRGKTVKNNKGEEKYISGEIDKLYDNNKQNEVKKNLKMFYSYDFNMNSKKEIEDFFSNIDEAISSIRHGIVHFNLELEGKDIFTFKNIVPSQISKKMFHDEINEKKLKLKIFKQLNSANVFRYLEKYKILNYLNRTRFEFVNKNIPFVPSFTKLYSRIDDLKNSLGIYWKTPKTNDDNKTKEITDAQIYLLKNIYYGEFLNYFMSNNGNFFEITKEIIELNKNDKRNLKTGFYKLQKFENLQEKTPKEYLANIQSLYMINAGNQDEEEKDTYIDFIQKIFLKGFMTYLANNGRLSLIYIGSDEETNTSLAEKKQEFDKFLKKYEQNNNIEIPYEINEFVREIKLGKILKYTERLNMFYLILKLLNHKELTNLKGSLEKYQSANKEEAFSDQLELINLLNLDNNRVTEDFELEADEIGKFLDFNGNKVKDNKELKKFDTNKIYFDGENIIKHRAFYNIKKYGMLNLLEKISDEAKYKISIEELKNYSKKKNEIEENHTTQENLHRKYARPRKDEKFTDEDYKKYEKAIRNIQQYTHLKNKVEFNELNLLQSLLLRILHRLVGYTSIWERDLRFRLKGEFPENQYIEEIFNFDNSKNVKYKNGQIVEKYINFYKELYKDDTEKISIYSDKKVKELKKEKKDLYIRNYIAHFNYIPNAEISLLEMLENLRKLLSYDRKLKNAIMKSIVDILKEYGFVVTFKIEKDKKIRIESLKSEEVVHLKKLKLKDNDKKKEPIKTYRNSKELCKLVKVMFEYKMKEKKSEN

SEQ ID NO: 68 - protein, 1138 aa, Bacteroides ihuae
MRITKVKVKESSDQKDKMVLIHRKVGEGTLVLDENLADLTAPIIDKYKDKSFELSLLKQTLVSEKEMNIPKCDKCTAKERCLSCKQREKRLKEVRGAIEKTIGAVIAGRDIIPRLNIFNEDEICWLIKPKLRNEFTFKDVNKQVVKLNLPKVLVEYSKKNDPTLFLAYQQWIAAYLKNKKGHIKKSILNNRVVIDYSDESKLSKRKQALELWGEEYETNQRIALESYHTSYNIGELVTLLPNPEEYVSDKGEIRPAFHYKLKNVLQMHQSTVFGTNEILCINPIFNENRANIQLSAYNLEVVKYFEHYFPIKKKKKNLSLNQAIYYLKVETLKERLSLQLENALRMNLLQKGKIKKHEFDKNTCSNTLSQIKRDEFFVLNLVEMCAFAANNIRNIVDKEQVNEILSKKDLCNSLSKNTIDKELCTKFYGADFSQIPVAIWAMRGSVQQIRNEIVHYKAEAIDKIFALKTFEYDDMEKDYSDTPFKQYLELSIEKIDSFFIEQLSSNDVLNYYCTEDVNKLLNKCKLSLRRTSIPFAPGFKTIYELGCHLQDSSNTYRIGHYLMLIGGRVANSTVTKASKAYPAYRFMLKLIYNHLFLNKFLDNHNKRFFMKAVAFVLKDNRENARNKFQYAFKEIRMMNNDESIASYMSYIHSLSVQEQEKKGDKNDKVRYNTEKFIEKVFVKGFDDFLSWLGVEFILSPNQEERDKTVTREEYENLMIKDRVEHSINSNQESHIAFFTFCKLLDANHLSDLRNEWIKFRSSGDKEGFSYNFAIDIIELCLLTVDRVEQRRDGYKEQTELKEYLSFFIKGNESENTVWKGFYFQQDNYTPVLYSPIELIRKYGTLELLKLIIVDEDKITQGEFEEWQTLKKVVEDKVTRRNELHQEWEDMKNKSSFSQEKCSIYQKLCRDIDRYNWLDNKLHLVHLRKLHNLVIQILSRMARFIALWDRDFVLLDASRANDDYKLLSFFNFRDFINAKKTKTDDELLAEFGSKIEKKNAPFIKAEDVPLMVECIEAKRSFYQKVFFRNNLQVLADRNFIAHYNYISKTAKCSLFEMIIKLRTLMYYDRKLRNAVVKSIANVFDQNGMVLQLSLDDSHELKVDKVISKRIVHLKNNNIMTDQVPEEYYKICRRLLEMKK

SEQ ID NO: 69 - protein, 697 aa, Porphyromonadaceae bacterium
MEFRDSIFKSLLQKEIEKAPLCFAEKLISGGVFSYYPSERLKEFVGNHPFSLFRKTMPFSPGFKRVMKSGGNYQNANRDGRFYDLDIGVYLPKDGFGDEEWNARYFLMKLIYNQLFLPYFADAENHLFRECVDFVKRVNRDYNCKNNNSEEQAFIDIRSMREDESIADYLAFIQSNIIIEENKKKETNKEGQINFNKFLLQVFVKGFDSFLKDRTELNFLQLPELQGDGTRGDDLESLDKLGAVVAVDLKLDATGIDADLNENISFYTFCKLLDSNHLSRLRNEIIKYQSANSDFSHNEDFDYDRIISIIELCMLSADHVSTNDNESIFPNNDKDFSGIRPYLSTDAKVETFEDLYVHSDAKTPITNATMVLNWKYGTDKLFERLMISDQDFLVTEKDYFVWKELKKDIEEKIKLREELHSLWVNTPKGKKGAKKKNGRETTGEFSEENKKEYLEVCREIDRYVNLDNKLHFVHLKRMHSLLIELLGRFVGFTYLFERDYQYYHLEIRSRRNKDAGVVDKLEYNKIKDQNKYDKDDFFACTFLYEKANKVRNFIAHFNYLTMWNSPQEEEHNSNLSGAKNSSGRQNLKCSLTELINELREVMSYDRKLKNAVTKAVIDLFDKHGMVIKFRIVNNNNNDNKNKHHLELDDIVPKKIMHLRGIKLKRQDGKPIPIQTDSVDPLYCRMWKKLLDLKPTPF

SEQ ID NO: 70 - protein, 204 aa, Listeria riparia
MHDAWAENPKKPQSDAFLKEYKACCEAIDTYNWHKNKATLVYVNELHHLLIDILGRLVGYVAIADRDFQCMANQYLKSSGHTERVDSWINTIRKNRPDYIEKLDIFMNKAGLFVSEKNGRNYIAHLNYLSPKHKYSLLYLFEKLREMLKYDRKLKNAVTKSLIDLLDKHGMCVVFANLKNNKHRLVIASLKPKKIETFKWKKIK

SEQ ID NO: 71 - protein, 1082 aa, Insolitispirillum peregrinum
MRIIRPYGSSTVASPSPQDAQPLRSLQRQNGTFDVAEFSRRHPELVLAQWVAMLDKIIRKPAPGKNSTALPRPTAEQRRLRQQVGAALWAEMQRHTPVPPELKAVWDSKVHPYSKDNAPATAKTPSHRGRWYDRFGDPETSAATVAEGVRRHLLDSAQPFRANGGQPKGKGVIEHRALTIQNGTLLHHHQSEKAGPLPEDWSTYRADELVSTIGKDARWIKVAASLYQHYGRIFGPTTPISEAQTRPEFVLHTAVKAYYRRLFKERKLPAERLERLLPRTGEALRHAVTVQHGNRSLADAVRIGKILHYGWLQNGEPDPWPDDAALYSSRYWGSDGQTDIKHSEAVSRVWRRALTAAQRTLTSWLYPAGTDAGDILLIGQKPDSIDRNRLPLLYGDSTRHWTRSPGDVWLFLKQTLENLRNSSFHFKTLSAFTSHLDGTCESEPAEQQAAQALWQDDRQQDHQQVFLSLRALDATTYLPTGPLHRIVNAVQSTDATLPLPRFRRVVTRAANTRLKGFPVEPVNRRTMEDDPLLRCRYGVLKLLYERGFRAWLETRPSIASCLDQSLKRSTKAAQTINGKNSPQGVEILSRATKLLQAEGGGGHGIHDLFDRLYAATAREMRVQVGYHHDAEAARQQAEFIEDLKCEVVARAFCAYLKTLGIQGDTFRRQPEPLPTWPDLPDLPSSTIGTAQAALYSVLHLMPVEDVGSLLHQLRRWLVALQARGGEDGTAITATIPLLELYLNRHDAKFSGGGAGTGLRWDDWQVFFDCQATFDRVFPPGPALDSHRLPLRGLREVLRFGRVNDLAALIGQDKITAAEVDRWHTAEQTIAAQQQRREALHEQLSRKKGTDAEVDEYRALVTAIADHRHLTAHVTLSNVVRLHRLMTTVLGRLVDYGGLWERDLTFVTLYEAHRLGGLRNLLSESRVNKFLDGQTPAALSKKNNAEENGMISKVLGDKARRQIRNDFAHFNMLQQGKKTINLTDEINNARKLMAHDRKLKNAITRSVTTLLQQDGLDIVWTMDASHRLTDAKIDSRNAIHLHKTHNRANIREPLHGKSYCRWVAALFGATSTPSATKKSDKIR

SEQ ID NO: 72 - protein, 1224 aa, Bergeyella zoohelcum
MENKTSLGNNIYYNPFKPQDKSYFAGYFNAAMENTDSVFRELGKRLKGKEYTSENFFDAIFKENISLVEYERYVKLLSDYFPMARLLDKKEVPIKERKENFKKNFKGIIKAVRDLRNFYTHKEHGEVEITDEIFGVLDEMLKSTVLTVKKKKVKTDKTKEILKKSIEKQLDILCQKKLEYLRDTARKIEEKRRNQRERGEKELVAPFKYSDKRDDLIAAIYNDAFDVYIDKKKDSLKESSKAKYNTKSDPQQEEGDLKIPISKNGVVFLLSLFLTKQEIHAFKSKIAGFKATVIDEATVSEATVSHGKNSICFMATHEIFSHLAYKKLKRKVRTAEINYGEAENAEQLSVYAKETLMMQMLDELSKVPDVVYQNLSEDVQKTFIEDWNEYLKENNGDVGTMEEEQVIHPVIRKRYEDKFNYFAIRFLDEFAQFPTLRFQVHLGNYLHDSRPKENLISDRRIKEKITVFGRLSELEHKKALFIKNTETNEDREHYWEIFPNPNYDFPKENISVNDKDFPIAGSILDREKQPVAGKIGIKVKLLNQQYVSEVDKAVKAHQLKQRKASKPSIQNIIEEIVPINESNPKEAIVFGGQPTAYLSMNDIHSILYEFFDKWEKKKEKLEKKGEKELRKEIGKELEKKIVGKIQAQIQQIIDKDTNAKILKPYQDGNSTAIDKEKLIKDLKQEQNILQKLKDEQTVREKEYNDFIAYQDKNREINKVRDRNHKQYLKDNLKRKYPEAPARKEVLYYREKGKVAVWLANDIKRFMPTDFKNEWKGEQHSLLQKSLAYYEQCKEELKNLLPEKVFQHLPFKLGGYFQQKYLYQFYTCYLDKRLEYISGLVQQAENFKSENKVFKKVENECFKFLKKQNYTHKELDARVQSILGYPIFLERGFMDEKPTIIKGKTFKGNEALFADWFRYYKEYQNFQTFYDTENYPLVELEKKQADRKRKTKIYQQKKNDVFTLLMAKHIFKSVFKQDSIDQFSLEDLYQSREERLGNQERARQTGERNTNYIWNKTVDLKLCDGKITVENVKLKNVGDFIKYEYDQRVQAFLKYEENIEWQAFLIKESKEEENYPYVVEREIEQYEKVRREELLKEVHLIEEYILEKVKDKEILKKGDNQNFKYYILNGLLKQLKNEDVESYKVFNLNTEPEDVNINQLKQEATDLEQKAFVLTYIRNKFAHNQLPKKEFWDYCQEKYGKIEKEKTYAEYFAEVFKKEKEALIK

SEQ ID NO: 73 - protein, 1126 aa, Prevotella intermedia
MEDDKKTTDSIRYELKDKHFWAAFLNLARHNVYITVNHINKILEEGEINRDGYETTLKNTWNEIKDINKKDRLSKLIIKHFPFLEAATYRLNPTDTTKQKEEKQAEAQSLESLRKSFFVFIYKLRDLRNHYSHYKHSKSLERPKFEEGLLEKMYNIFNASIRLVKEDYQYNKDINPDEDFKHLDRTEEEFNYYFTKDNEGNITESGLLFFVSLFLEKKDAIWMQQKLRGFKDNRENKKKMTNEVFCRSRMLLPKLRLQSTQTQDWILLDMLNELIRCPKSLYERLREEDREKFRVPIEIADEDYDAEQEPFKNTLVRHQDRFPYFALRYFDYNEIFTNLRFQIDLGTYHFSIYKKQIGDYKESHHLTHKLYGFERIQEFTKQNRPDEWRKFVKTFNSFETSKEPYIPETTPHYHLENQKIGIRFRNDNDKIWPSLKTNSEKNEKSKYKLDKSFQAEAFLSVHELLPMMFYYLLLKTENTDNDNEIETKKKENKNDKQEKHKIEEIIENKITEIYALYDTFANGEIKSIDELEEYCKGKDIEIGHLPKQMIAILKDEHKVMATEAERKQEEMLVDVQKSLESLDNQINEEIENVERKNSSLKSGKIASWLVNDMMRFQPVQKDNEGKPLNNSKANSTEYQLLQRTLAFFGSEHERLAPYFKQTKLIESSNPHPFLKDTEWEKCNNILSFYRSYLEAKKNFLESLKPEDWEKNQYFLKLKEPKTKPKTLVQGWKNGFNLPRGIFTEPIRKWFMKHRENITVAELKRVGLVAKVIPLFFSEEYKDSVQPFYNYHFNVGNINKPDEKNFLNCEERRELLRKKKDEFKKMTDKEKEENPSYLEFKSWNKFERELRLVRNQDIVTWLLCMELFNKKKIKELNVEKIYLKNINTNTTKKEKNTEEKNGEEKNIKEKNNILNRIMPMRLPIKVYGRENFSKNKKKKIRRNTFFTVYIEEKGTKLLKQGNFKALERDRRLGGLFSFVKTPSKAESKSNTISKLRVEYELGEYQKARIEIIKDMLALEKTLIDKYNSLDTDNFNKMLTDWLELKGEPDKASFQNDVDLLIAVRNAFSHNQYPMRNRIAFANINPFSLSSANTSEEKGLGIANQLKDKTHKTIEKIIEIEKPIETKE

SEQ ID NO: 74 - protein, 1127 aa, Prevotella buccae
MQKQDKLFVDRKKNAIFAFPKYITIMENKEKPEPIYYELTDKHFWAAFLNLARHNVYTTINHINRRLEIAELKDDGYMMGIKGSWNEQAKKLDKKVRLRDLIMKHFPFLEAAAYEMTNSKSPNNKEQREKEQSEALSLNNLKNVLFIFLEKLQVLRNYYSHYKYSEESPKPIFETSLLKNMYKVFDANVRLVKRDYMHHENIDMQRDFTHLNRKKQVGRTKNIIDSPNFHYHFADKEGNMTIAGLLFFVSLFLDKKDAIWMQKKLKGFKDGRNLREQMTNEVFCRSRISLPKLKLENVQTKDWMQLDMLNELVRCPKSLYERLREKDRESFKVPFDIFSDDYNAEEEPFKNTLVRHQDRFPYFVLRYFDLNEIFEQLRFQIDLGTYHFSIYNKRIGDEDEVRHLTHHLYGFARIQDFAPQNQPEEWRKLVKDLDHFETSQEPYISKTAPHYHLENEKIGIKFCSAHNNLFPSLQTDKTCNGRSKFNLGTQFTAEAFLSVHELLPMMFYYLLLTKDYSRKESADKVEGIIRKEISNIYAIYDAFANNEINSIADLTRRLQNTNILQGHLPKQMISILKGRQKDMGKEAERKIGEMIDDTQRRLDLLCKQTNQKIRIGKRNAGLLKSGKIADWLVNDMMRFQPVQKDQNNIPINNSKANSTEYRMLQRALALFGSENFRLKAYFNQMNLVGNDNPHPFLAETQWEHQTNILSFYRNYLEARKKYLKGLKPQNWKQYQHFLILKVQKTNRNTLVTGWKNSFNLPRGIFTQPIREWFEKHNNSKRIYDQILSFDRVGFVAKAIPLYFAEEYKDNVQPFYDYPFNIGNRLKPKKRQFLDKKERVELWQKNKELFKNYPSEKKKTDLAYLDFLSWKKFERELRLIKNQDIVTWLMFKELFNMATVEGLKIGEIHLRDIDTNTANEESNNILNRIMPMKLPVKTYETDNKGNILKERPLATFYIEETETKVLKQGNFKALVKDRRLNGLFSFAETTDLNLEEHPISKLSVDLELIKYQTTRISIFEMTLGLEKKLIDKYSTLPTDSFRNMLERWLQCKANRPELKNYVNSLIAVRNAFSHNQYPMYDATLFAEVKKFTLFPSVDTKKIELNIAPQLLEIVGKAIKEIEKSENKN

SEQ ID NO: 75 - protein, 1135 aa, Porphyromonas gingivalis
MNTVPASENKGQSRTVEDDPQYFGLYLNLARENLIEVESHVRIKFGKKKLNEESLKQSLLCDHLLSVDRWTKVYGHSRRYLPFLHYFDPDSQIEKDHDSKTGVDPDSAQRLIRELYSLLDFLRNDFSHNRLDGTTFEHLEVSPDISSFITGTYSLACGRAQSRFAVFFKPDDFVLAKNRKEQLISVADGKECLTVSGFAFFICLFLDREQASGMLSRIRGFKRTDENWARAVHETFCDLCIRHPHDRLESSNTKEALLLDMLNELNRCPRILYDMLPEEERAQFLPALDENSMNNLSENSLDEESRLLWDGSSDWAEALTKRIRHQDRFPYLMLRFIEEMDLLKGIRFRVDLGEIELDSYSKKVGRNGEYDRTITDHALAFGKLSDFQNEEEVSRMISGEASYPVRFSLFAPRYAIYDNKIGYCHTSDPVYPKSKTGEKRALSNPQSMGFISVHDLRKLLLMELLCEGSFSRMQSDFLRKANRILDETAEGKLQFSALFPEMRHRFIPPQNPKSKDRREKAETTLEKYKQEIKGRKDKLNSQLLSAFDMDQRQLPSRLLDEWMNIRPASHSVKLRTYVKQLNEDCRLRLRKFRKDGDGKARAIPLVGEMATFLSQDIVRMIISEETKKLITSAYYNEMQRSLAQYAGEENRRQFRAIVAELRLLDPSSGHPFLSATMETAHRYTEGFYKCYLEKKREWLAKIFYRPEQDENTKRRISVFFVPDGEARKLLPLLIRRRMKEQNDLQDWIRNKQAHPIDLPSHLFDSKVMELLKVKDGKKKWNEAFKDWWSTKYPDGMQPFYGLRRELNIHGKSVSYIPSDGKKFADCYTHLMEKTVRDKKRELRTAGKPVPPDLAADIKRSFHRAVNEREFMLRLVQEDDRLMLMAINKMMTDREEDILPGLKNIDSILDEENQFSLAVHAKVLEKEGEGGDNSLSLVPATIEIKSKRKDWSKYIRYRYDRRVPGLMSHFPEHKATLDEVKTLLGEYDRCRIKIFDWAFALEGAIMSDRDLKPYLHESSSREGKSGEHSTLVKMLVEKKGCLTPDESQYLILIRNKAAHNQFPCAAEMPLIYRDVSAKVGSIEGSSAKDLPEGSSLVDSLWKKYEMIIRKILPILDPENRFFGKLLNNMSQPINDL

SEQ ID NO: 76 - protein, 1115 aa, Bacteroides pyogenes
MESIKNSQKSTGKTLQKDPPYFGLYLNMALLNVRKVENHIRKWLGDVALLPEKSGFHSLLTTDNLSSAKWTRFYYKSRKFLPFLEMFDSDKKSYENRRETAECLDTIDRQKISSLLKEVYGKLQDIRNAFSHYHIDDQSVKHTALIISSEMHRFIENAYSFALQKTRARFTGVFVETDFLQAEEKGDNKKFFAIGGNEGIKLKDNALIFLICLFLDREEAFKFLSRATGFKSTKEKGFLAVRETFCALCCRQPHERLLSVNPREALLMDMLNELNRCPDILFEMLDEKDQKSFLPLLGEEEQAHILENSLNDELCEAIDDPFEMIASLSKRVRYKNRFPYLMLRYIEEKNLLPFIRFRIDLGCLELASYPKKMGEENNYERSVTDHAMAFGRLTDFHNEDAVLQQITKGITDEVRFSLYAPRYAIYNNKIGFVRTSGSDKISFPTLKKKGGEGHCVAYTLQNTKSFGFISIYDLRKILLLSFLDKDKAKNIVSGLLEQCEKHWKDLSENLFDAIRTELQKEFPVPLIRYTLPRSKGGKLVSSKLADKQEKYESEFERRKEKLTEILSEKDFDLSQIPRRMIDEWLNVLPTSREKKLKGYVETLKLDCRERLRVFEKREKGEHPLPPRIGEMATDLAKDIIRMVIDQGVKQRITSAYYSEIQRCLAQYAGDDNRRHLDSIIRELRLKDTKNGHPFLGKVLRPGLGHTEKLYQRYFEEKKEWLEATFYPAASPKRVPRFVNPPTGKQKELPLIIRNLMKERPEWRDWKQRKNSHPIDLPSQLFENEICRLLKDKIGKEPSGKLKWNEMFKLYWDKEFPNGMQRFYRCKRRVEVFDKVVEYEYSEEGGNYKKYYEALIDEVVRQKISSSKEKSKLQVEDLTLSVRRVFKRAINEKEYQLRLLCEDDRLLFMAVRDLYDWKEAQLDLDKIDNMLGEPVSVSQVIQLEGGQPDAVIKAECKLKDVSKLMRYCYDGRVKGLMPYFANHEATQEQVEMELRHYEDHRRRVFNWVFALEKSVLKNEKLRRFYEESQGGCEHRRCIDALRKASLVSEEEYEFLVHIRNKSAHNQFPDLEIGKLPPNVTSGFCECIWSKYKAIICRIIPFIDPERRFFGKLLEQK

SEQ ID NO: 77 - protein, 953 aa, Alistipes sp.
MSNEIGAFREHQFAYAPGNEKQEEATFATYFNLALSNVEGMMFGEVESNPDKIEKSLDTLPPAILRQIASFIWLSKEDHPDKAYSTEEVKVIVTDLVRRLCFYRNYFSHCFYLDTQYFYSDELVDTTAIGEKLPYNFHHFITNRLFRYSLPEITLFRWNEGERKYEILRDGLIFFCCLFLKRGQAERFLNELRFFKRTDEEGRIKRTIFTKYCTRESHKHIGIEEQDFLIFQDIIGDLNRVPKVCDGVVDLSKENERYIKNRETSNESDENKARYRLLIREKDKFPYYLMRYIVDFGVLPCITFKQNDYSTKEGRGQFHYQDAAVAQEERCYNFVVRNGNVYYSYMPQAQNVVRISELQGTISVEELRNMVYASINGKDVNKSVEQYLYHLHLLYEKILTISGQTIKEGRVDVEDYRPLLDKLLLRPASNGEELRRELRKLLPKRVCDLLSNRFDCSEGVSAVEKRLKAILLRHEQLLLSQNPALHIDKIKSVIDYLYLFFSDDEKFRQQPTEKAHRGLKDEEFQMYHYLVGDYDSHPLALWKELEASGRLKPEMRKLTSATSLHGLYMLCLKGTVEWCRKQLMSIGKGTAKVEAIADRVGLKLYDKLKEYTPEQLEREVKLVVMHGYAAAATPKPKAQAAIPSKLTELRFYSFLGKREMSFAAFIRQDKKAQKLWLRNFYTVENIKTLQKRQAAADAACKKLYNLVGEVERVHTNDKVLVLVAQRYRERLLNVGSKCAVTLDNPERQQKLADVYEVQNAWLSIRFDDLDFTLTHVNLSNLRKAYNLIPRKHILAFKEYLDNRVKQKLCEECRNVRRKEDLCTCCSPRYSNLTSWLKENHSESSIEREAATMMLLDVERKLLSFLLDERRKAIIEYGKFIPFSALVKECRLADAGLCGIRNDVLHDNVISYADAIGKLSAYFPKEASEAVEYIRRTKEVREQRREELMANSSQ

SEQ ID NO: 78 - protein, 1322 aa, Prevotella sp.
MSKECKKQRQEKKRRLQKANFSISLTGKHVFGAYFNMARTNFVKTINYILPIAGVRGNYSENQINKMLHALFLIQAGRNEELTTEQKQWEKKLRLNPEQQTKFQKLLFKHFPVLGPMMADVADHKAYLNKKKSTVQTEDETFAMLKGVSLADCLDIICLMADTLTECRNFYTHKDPYNKPSQLADQYLHQEMIAKKLDKVVVASRRILKDREGLSVNEVEFLTGIDHLHQEVLKDEFGNAKVKDGKVMKTFVEYDDFYFKISGKRLVNGYTVTTKDDKPVNVNTMLPALSDFGLLYFCVLFLSKPYAKLFIDEVRLFEYSPFDDKENMIMSEMLSIYRIRTPRLHKIDSHDSKATLAMDIFGELRRCPMELYNLLDKNAGQPFFHDEVKHPNSHTPDVSKRLRYDDRFPTLALRYIDETELFKRIRFQLQLGSFRYKFYDKENCIDGRVRVRRIQKEINGYGRMQEVADKRMDKWGDLIQKREERSVKLEHEELYINLDQFLEDTADSTPYVTDRRPAYNIHANRIGLYWEDSQNPKQYKVFDENGMYIPELVVTEDKKAPIKMPAPRCALSVYDLPAMLFYEYLREQQDNEFPSAEQVIIEYEDDYRKFFKAVAEGKLKPFKRPKEFRDFLKKEYPKLRMADIPKKLQLFLCSHGLCYNNKPETVYERLDRLTLQHLEERELHIQNRLEHYQKDRDMIGNKDNQYGKKSFSDVRHGALARYLAQSMMEWQPTKLKDKEKGHDKLTGLNYNVLTAYLATYGHPQVPEEGFTPRTLEQVLINAHLIGGSNPHPFINKVLALGNRNIEELYLHYLEEELKHIRSRIQSLSSNPSDKALSALPFIHHDRMRYHERTSEEMMALAARYTTIQLPDGLFTPYILEILQKHYTENSDLQNALSQDVPVKLNPTCNAAYLITLFYQTVLKDNAQPFYLSDKTYTRNKDGEKAESFSFKRAYELFSVLNNNKKDTFPFEMIPLFLTSDEIQERLSAKLLDGDGNPVPEVGEKGKPATDSQGNTIWKRRIYSEVDDYAEKLTDRDMKISFKGEWEKLPRWKQDKIIKRRDETRRQMRDELLQRMPRYIRDIKDNERTLRRYKTQDMVLFLLAEKMFTNIISEQSSEFNWKQMRLSKVCNEAFLRQTLTFRVPVTVGETTIYVEQENMSLKNYGEFYRFLTDDRLMSLLNNIVETLKPNENGDLVIRHTDLMSELAAYDQYRSTIFMLIQSIENLIITNNAVLDDPDADGFWVREDLPKRNNFASLLELINQLNNVELTDDERKLLVAIRNAFSHNSYNIDFSLIKDVKHLPEVAKGILQHLQSMLGVEITK

SEQ ID NO: 79 - protein, 1322 aa, Prevotella sp.; identical to SEQ ID NO: 78

SEQ ID NO: 80 - protein, 1095 aa, Riemerella anatipestifer
MEKPLLPNVYTLKHKFFWGAFLNIARHNAFITICHINEQLGLKTPSNDDKIVDVVCETWNNILNNDHDLLKKSQLTELILKHFPFLTAMCYHPPKKEGKKKGHQKEQQKEKESEAQSQAEALNPSKLIEALEILVNQLHSLRNYYSHYKHKKPDAEKDIFKHLYKAFDASLRMVKEDYKAHFTVNLTRDFAHLNRKGKNKQDNPDFNRYRFEKDGFFTESGLLFFTNLFLDKRDAYWMLKKVSGFKASHKQREKMTTEVFCRSRILLPKLRLESRYDHNQMLLDMLSELSRCPKLLYEKLSEENKKHFQVEADGFLDEIEEEQNPFKDTLIRHQDRFPYFALRYLDLNESFKSIRFQVDLGTYHYCIYDKKIGDEQEKRHLTRTLLSFGRLQDFTEINRPQEWKALTKDLDYKETSNQPFISKTTPHYHITDNKIGFRLGTSKELYPSLEIKDGANRIAKYPYNSGFVAHAFISVHELLPLMFYQHLTGKSEDLLKETVRHIQRIYKDFEEERINTIEDLEKANQGRLPLGAFPKQMLGLLQNKQPDLSEKAKIKIEKLIAETKLLSHRLNTKLKSSPKLGKRREKLIKTGVLADWLVKDFMRFQPVAYDAQNQPIKSSKANSTEFWFIRRALALYGGEKNRLEGYFKQTNLIGNTNPHPFLNKFNWKACRNLVDFYQQYLEQREKFLEAIKNQPWEPYQYCLLLKIPKENRKNLVKGWEQGGISLPRGLFTEAIRETLSEDLMLSKPIRKEIKKHGRVGFISRAITLYFKEKYQDKHQSFYNLSYKLEAKAPLLKREEHYEYWQQNKPQSPTESQRLELHTSDRWKDYLLYKRWQHLEKKLRLYRNQDVMLWLMTLELTKNHFKELNLNYHQLKLENLAVNVQEADAKLNPLNQTLPMVLPVKVYPATAFGEVQYHKTPIRTVYIREEHTKALKMGNFKALVKDRRLNGLFSFIKEENDTQKHPISQLRLRRELEIYQSLRVDAFKETLSLEEKLLNKHTSLSSLENEFRALLEEWKKEYAASSMVTDEHIAFIASVRNAFCHNQYPFYKEALHAPIPLFTVAQPTTEEKDGLGIAEALLKVLREYCEIVKSQI

SEQ ID NO: 81 - protein, 1124 aa, Prevotella aurantiaca
MEDDKKTTGSISYELKDKHFWAAFLNLARHNVYITINHINKLLEIREIDNDEKVLDIKTLWQKGNKDLNQKARLRELMTKHFPFLETAIYTKNKEDKKEVKQEKQAEAQSLESLKDCLFLFLDKLQEARNYYSHYKYSEFSKEPEFEEGLLEKMYNIFGNNIQLVINDYQHNKDINPDEDFKHLDRKGQFKYSFADNEGNITESGLLFFVSLFLEKKDAIWMQQKLNGFKDNLENKKKMTHEVFCRSRILMPKLRLESTQTQDWILLDMLNELIRCPKSLYERLQGDDREKFKVPFDPADEDYNAEQEPFKNTLIRHQDRFPYFVLRYFDYNEIFKNLRFQIDLGTYHFSIYKKLIGGQKEDRHLTHKLYGFERIQEFAKQNRPDEWKAIVKDLDTYETSNKRYISETTPHYHLENQKIGIRFRNGNKEIWPSLKTNDENNEKSKYKLDKQYQAEAFLSVHELLPMMFYYLLLKKEKPNNDEINASIVEGFIKREIRNIFKLYDAFANGEINNIDDLEKYCADKGIPKRHLPKQMVAILYDEHKDMVKEAKRKQKEMVKDTKKLLATLEKQTQKEKEDDGRNVKLLKSGEIARWLVNDMMRFQPVQKDNEGKPLNNSKANSTEYQMLQRSLALYNNEEKPTRYFRQVNLIESNNPHPFLKWTKWEECNNILTFYYSYLTKKIEFLNKLKPEDWKKNQYFLKLKEPKTNRETLVQGWKNGFNLPRGIFTEPIREWFKRHQNNSKEYEKVEALDRVGLVTKVIPLFFKEEYFKDKEENFKEDTQKEINDCVQPFYNFPYNVGNIHKPKEKDFLHREERIELWDKKKDKFKGYKEKIKSKKLTEKDKEEFRSYLEFQSWNKFERELRLVRNQDIVTWLLCKELIDKLKIDELNIEELKKLRLNNIDTDTAKKEKNNILNRVMPMELPVTVYEIDDSHKIVKDKPLHTIYIKEAETKLLKQGNFKALVKDRRLNGLFSFVKTNSEAESKRNPISKLRVEYELGEYQEARIEIIQDMLALEEKLINKYKDLPTNKFSEMLNSWLEGKDEADKARFQNDVDFLIAVRNAFSHNQYPMHNKIEFANIKPFSLYTANNSEEKGLGIANQLKDKTKETTDKIKKIEKPIETKE

SEQ ID NO: 82 - protein, 1151 aa, Prevotella saccharolytica
MEDKPFWAAFFNLARHNVYLTVNHINKLLDLEKLYDEGKHKEIFEREDIFNISDDVMNDANSNGKKRKLDIKKIWDDLDTDLTRKYQLRELILKHFPFIQPAIIGAQTKERTTIDKDKRSTSTSNDSLKQTGEGDINDLLSLSNVKSMFFRLLQILEQLRNYYSHVKHSKSATMPNFDEDLLNWMRYIFIDSVNKVKEDYSSNSVIDPNTSFSHLIYKDEQGKIKPCRYPFTSKDGSINAFGLLFFVSLFLEKQDSIWMQKKIPGFKKASENYMKMTNEVFCRNHILLPKIRLETVYDKDWMLLDMLNEVVRCPLSLYKRLTPAAQNKFKVPEKSSDNANRQEDDNPFSRILVRHQNRFPYFVLRFFDLNEVFTTLRFQINLGCYHFAICKKQIGDKKEVHHLIRTLYGFSRLQNFTQNTRPEEWNTLVKTTEPSSGNDGKTVQGVPLPYISYTIPHYQIENEKIGIKIFDGDTAVDTDIWPSVSTEKQLNKPDKYTLTPGFKADVFLSVHELLPMMFYYQLLLCEGMLKTDAGNAVEKVLIDTRNAIFNLYDAFVQEKINTITDLENYLQDKPILIGHLPKQMIDLLKGHQRDMLKAVEQKKAMLIKDTERRLKLLDKQLKQETDVAAKNTGTLLKNGQIADWLVNDMMRFQPVKRDKEGNPINCSKANSTEYQMLQRAFAFYATDSCRLSRYFTQLHLIHSDNSHLFLSRFEYDKQPNLIAFYAAYLKAKLEFLNELQPQNWASDNYFLLLRAPKNDRQKLAEGWKNGFNLPRGLFTEKIKTWFNEHKTIVDISDCDIFKNRVGQVARLIPVFFDKKFKDHSQPFYRYDFNVGNVSKPTEANYLSKGKREELFKSYQNKFKNNIPAEKTKEYREYKNFSLWKKFERELRLIKNQDILIWLMCKNLFDEKIKPKKDILEPRIAVSYIKLDSLQTNTSTAGSLNALAKVVPMTLAIHIDSPKPKGKAGNNEKENKEFTVYIKEEGTKLLKWGNFKTLLADRRIKGLFSYIEHDDIDLKQHPLTKRRVDLELDLYQTCRIDIFQQTLGLEAQLLDKYSDLNTDNFYQMLIGWRKKEGIPRNIKEDTDFLKDVRNAFSHNQYPDSKKIAFRRIRKFNPKELILEEEEGLGIATQMYKEVEKVVNRIKRIELFD

SEQ ID NO: 83 - protein, 1159 aa, Myroides odoratimimus
MKDILTTDTTEKQNRFYSHKIADKYFFGGYFNLASNNIYEVFEEVNKRNTFGKLAKRDNGNLKNYIIHVFKDELSISDFEKRVAIFASYFPILETVDKKSIKERNRTIDLTLSQRIRQFREMLISLVTAVDQLRNFYTHYHHSDIVIENKVLDFLNSSFVSTALHVKDKYLKTDKTKEFLKETIAAELDILIEAYKKKQIEKKNTRFKANKREDILNAIYNEAFWSFINDKDKDKDKETVVAKGADAYFEKNHHKSNDPDFALNISEKGIVYLLSFFLTNKEMDSLKANLTGFKGKVDRESGNSIKYMATQRIYSFHTYRGLKQKIRTSEEGVKETLLMQMIDELSKVPNVVYQHLSTTQQNSFIEDWNEYYKDYEDDVETDDLSRVIHPVIRKRYEDRFNYFAIRFLDEFFDFPTLRFQVHLGDYVHDRRTKQLGKVESDRIIKEKVTVFARLKDINSAKASYFHSLEEQDKEELDNKWTLFPNPSYDFPKEHTLQHQGEQKNAGKIGIYVKLRDTQYKEKAALEEARKSLNPKERSATKASKYDIITQIIEANDNVKSEKPLVFTGQPIAYLSMNDIHSMLFSLLTDNAELKKTPEEVEAKLIDQIGKQINEILSKDTDTKILKKYKDNDLKETDTDKITRDLARDKEEIEKLILEQKQRADDYNYTSSTKFNIDKSRKRKHLLFNAEKGKIGVWLANDIKRFMFKESKSKWKGYQHTELQKLFAYFDTSKSDLELILSNMVMVKDYPIELIDLVKKSRTLVDFLNKYLEARLEYIENVITRVKNSIGTPQFKTVRKECFTFLKKSNYTVVSLDKQVERILSMPLFIERGFMDDKPTMLEGKSYKQHKEKFADWFVHYKENSNYQNFYDTEVYEITTEDKREKAKVTKKIKQQQKNDVFTLMMVNYMLEEVLKLSSNDRLSLNELYQTKEERIVNKQVAKDTQERNKNYIWNKVVDLQLCDGLVHIDNVKLKDIGNFRKYENDSRVKEFLTYQSDIVWSAYLSNEVDSNKLYVIERQLDNYESIRSKELLKEVQEIECSVYNQVANKESLKQSGNENFKQYVLQGLLPIGMDVREMLILSTDVKFKKEEIIQLGQAGEVEQDLYSLIYIRNKFAHNQLPIKEFFDFCENNYRSISDNEYYAEYYMEIFRSIKEKYAN

SEQ ID NO: 84 - protein, 1120 aa, Prevotella intermedia
MEDDKKTTDSIRYELKDKHFWAAFLNLARHNVYITVNHINKILEEDEINRDGYENTLENSWNEIKDINKKDRLSKLIIKHFPFLEATTYRQNPTDTTKQKEEKQAEAQSLESLKKSFFVFIYKLRDLRNHYSHYKHSKSLERPKFEEDLQNKMYNIFDVSIQFVKEDYKHNTDINPKKDFKHLDRKRKGKFHYSFADNEGNITESGLLFFVSLFLEKKDAIWVQKKLEGFKCSNKSYQKMTNEVFCRSRMLLPKLRLESTQTQDWILLDMLNELIRCPKSLYERLQGVNRKKFYVSFDPADEDYDAEQEPFKNTLVRHQDRFPYFALRYFDYNEVFANLRFQIDLGTYHFSIYKKLIGGQKEDRHLTHKLYGFERIQEFDKQNRPDEWKAIVKDSDTFKKKEEKEEEKPYISETTPHYHLENKKIGIAFKNHNIWPSTQTELTNNKRKKYNLGTSIKAEAFLSVHELLPMMFYYLLLKTENTKNDNKVGGKKETKKQGKHKIEAIIESKIKDIYALYDAFANGEINSEDELKEYLKGKDIKIVHLPKQMIAILKNEHKDMAEKAEAKQEKMKLATENRLKTLDKQLKGKIQNGKRYNSAPKSGEIASWLVNDMMRFQPVQKDENGESLNNSKANSTEYQLLQRTLAFFGSEHERLAPYFKQTKLIESSNPHPFLNDTEWEKCSNILSFYRSYLKARKNFLESLKPEDWEKNQYFLMLKEPKTNRETLVQGWKNGFNLPRGFFTEPIRKWFMEHWKSIKVDDLKRVGLVAKVTPLFFSEKYKDSVQPFYNYPFNVGDVNKPKEEDFLHREERIELWDKKKDKFKGYKAKKKFKEMTDKEKEEHRSYLEFQSWNKFERELRLVRNQDIVTWLLCTELIDKLKIDELNIKELKKLRLKDINTDTAKKEKNNILNRVMPMELPVTVYKVNKGGYIIKNKPLHTIYIKEAETKLLKQGNFKALVKDRRLNGLFSFVKTPSEAESESNPISKLRVEYELGKYQNARLDIIEDMLALEKKLIDKYNSLDTDNFHNMLTGWLELKGEAKKARFQNDVKLLTAVRNAFSHNQYPMYDENLFGNIERFSLSSSNIIESKGLDIAAKLKEEVSKAAKKIQNEEDNKKEKET

SEQ ID NO: 85 - protein, 1199 aa, Capnocytophaga canimorsus
MKNIQRLGKGNEFSPFKKEDKFYFGGFLNLANNNIEDFFKEIITRFGIVITDENKKPKETFGEKILNEIFKKDISIVDYEKWVNIFADYFPFTKYLSLYLEEMQFKNRVICFRDVMKELLKTVEALRNFYTHYDHEPIKIEDRVFYFLDKVLLDVSLTVKNKYLKTDKTKEFLNQHIGEELKELCKQRKDYLVGKGKRIDKESEIINGIYNNAFKDFICKREKQDDKENHNSVEKILCNKEPQNKKQKSSATVWELCSKSSSKYTEKSFPNRENDKHCLEVPISQKGIVFLLSFFLNKGEIYALTSNIKGFKAKITKEEPVTYDKNSIRYMATHRMFSFLAYKGLKRKIRTSEINYNEDGQASSTYEKETLMLQMLDELNKVPDVVYQNLSEDVQKTFIEDWNEYLKENNGDVGTMEEEQVIHPVIRKRYEDKFNYFAIRFLDEFAQFPTLRFQVHLGNYLCDKRTKQICDTTTEREVKKKITVFGRLSELENKKAIFLNEREEIKGWEVFPNPSYDFPKENISVNYKDFPIVGSILDREKQPVSNKIGIRVKIADELQREIDKAIKEKKLRNPKNRKANQDEKQKERLVNEIVSTNSNEQGEPVVFIGQPTAYLSMNDIHSVLYEFLINKISGEALETKIVEKIETQIKQIIGKDATTKILKPYTNANSNSINREKLLRDLEQEQQILKTLLEEQQQREKDKKDKKSKRKHELYPSEKGKVAVWLANDIKRFMPKAFKEQWRGYHHSLLQKYLAYYEQSKEELKNLLPKEVFKHFPFKLKGYFQQQYLNQFYTDYLKRRLSYVNELLLNIQNFKNDKDALKATEKECFKFFRKQNYIINPINIQIQSILVYPIFLKRGFLDEKPTMIDREKFKENKDTELADWFMHYKNYKEDNYQKFYAYPLEKVEEKEKFKRNKQINKQKKNDVYTLMMVEYIIQKIFGDKFVEENPLVLKGIFQSKAERQQNNTHAATTQERNLNGILNQPKDIKIQGKITVKGVKLKDIGNFRKYEIDQRVNTFLDYEPRKEWMAYLPNDWKEKEKQGQLPPNNVIDRQISKYETVRSKILLKDVQELEKIISDEIKEEHRHDLKQGKYYNFKYYILNGLLRQLKNENVENYKVFKLNTNPEKVNITQLKQEATDLEQKAFVLTYIRNKFAHNQLPKKEFWDYCQEKYGKIEKEKTYAEYFAEVFKREKEALIK

SEQ ID NO: 86 - protein, 1175 aa, Porphyromonas gulae
MTEQSERPYNGTYYTLEDKHFWAAFLNLARHNAYITLTHIDRQLAYSKADITNDQDVLSFKALWKNFDNDLERKSRLRSLILKHFSFLEGAAYGKKLFESKSSGNKSSKNKELTKKEKEELQANALSLDNLKSILFDFLQKLKDFRNYYSHYRHSGSSELPLFDGNMLQRLYNVFDVSVQRVKIDHEHNDEVDPHYHFNHLVRKGKKDRYGHNDNPSFKHHFVDGEGMVTEAGLLFFVSLFLEKRDAIWMQKKIRGFKGGTETYQQMTNEVFCRSRISLPKLKLESLRMDDWMLLDMLNELVRCPKPLYDRLREDDRACFRVPVDILPDEDDTDGGGEDPFKNTLVRHQDRFPYFALRYFDLKKVFTSLRFHIDLGTYHFAIYKKMIGEQPEDRHLTRNLYGFGRIQDFAEEHRPEEWKRLVRDLDYFETGDKPYISQTSPHYHIEKGKIGLRFMPEGQHLWPSPEVGTTRTGRSKYAQDKRLTAEAFLSVHELMPMMFYYFLLREKYSEEVSAERVQGRIKRVIEDVYAVYDAFARDEINTRDELDACLADKGIRRGHLPRQMIAILSQEHKDMEEKIRKKLQEMMADTDHRLDMLDRQTDRKIRIGRKNAGLPKSGVIADWLVRDMMRFQPVAKDASGKPLNNSKANSTEYRMLQRALALFGGEKERLTPYFRQMNLTGGNNPHPFLHETRWESHTNILSFYRSYLRARKAFLERIGRSDRVENRPFLLLKEPKTDRQTLVAGWKGEFHLPRGIFTEAVRDCLIEMGHDEVASYKEVGFMAKAVPLYFERACEDRVQPFYDSPFNVGNSLKPKKGRFLSKEERAEEWERGKERFRDLEAWSYSAARRIEDAFAGIEYASPGNKKKIEQLLRDLSLWEAFESKLKVRADRINLAKLKKEILEAQEHPYHDFKSWQKFERELRLVKNQDIITWMMCRDLMEENKVEGLDTGTLYLKDIRPNVQEQGSLNVLNRVKPMRLPVVVYRADSRGHVHKEEAPLATVYIEERDTKLLKQGNFKSFVKDRRLNGLFSFVDTGGLAMEQYPISKLRVEYELAKYQTARVCVFELTLRLEESLLTRYPHLPDESFREMLESWSDPLLAKWPELHGKVRLLIAVRNAFSHNQYPMYDEAVFSSIRKYDPSSPDAIEERMGLNIAHRLSEEVKQAKETVERIIQA

SEQ ID NO: 87 - protein, 1090 aa, Prevotella sp.
MNIPALVENQKKYFGTYSVMAMLNAQTVLDHIQKVADIEGEQNENNENLWFHPVMSHLYNAKNGYDKQPEKTMFIIERLQSYFPFLKIMAENQREYSNGKYKQNRVEVNSNDIFEVLKRAFGVLKMYRDLTNHYKTYEEKLNDGCEFLTSTEQPLSGMINNYYTVALRNMNERYGYKTEDLAFIQDKRFKFVKDAYGKKKSQVNTGFFLSLQDYNGDTQKKLHLSGVGIALLICLFLDKQYINIFLSRLPIFSSYNAQSEERRIIIRSFGINSIKLPKDRIHSEKSNKSVAMDMLNEVKRCPDELFTTLSAEKQSRFRIISDDHNEVLMKRSSDRFVPLLLQYIDYGKLFDHIRFHVNMGKLRYLLKADKTCIDGQTRVRVIEQPLNGFGRLEEAETMRKQENGTFGNSGIRIRDFENMKRDDANPANYPYIVDTYTHYILENNKVEMFINDKEDSAPLLPVIEDDRYVVKTIPSCRMSTLEIPAMAFHMFLFGSKKTEKLIVDVHNRYKRLFQAMQKEEVTAENIASFGIAESDLPQKILDLISGNAHGKDVDAFIRLTVDDMLTDTERRIKRFKDDRKSIRSADNKMGKRGFKQISTGKLADFLAKDIVLFQPSVNDGENKITGLNYRIMQSAIAVYDSGDDYEAKQQFKLMFEKARLIGKGTTEPHPFLYKVFARSIPANAVEFYERYLIERKFYLTGLSNEIKKGNRVDVPFIRRDQNKWKTPAMKTLGRIYSEDLPVELPRQMFDNEIKSHLKSLPQMEGIDFNNANVTYLIAEYMKRVLDDDFQTFYQWNRNYRYMDMLKGEYDRKGSLQHCFTSVEEREGLWKERASRTERYRKQASNKIRSNRQMRNASSEEIETILDKRLSNSRNEYQKSEKVIRRYRVQDALLFLLAKKTLTELADFDGERFKLKEIMPDAEKGILSEIMPMSFTFEKGGKKYTITSEGMKLKNYGDFFVLASDKRIGNLLELVGSDIVSKEDIMEEFNKYDQCRPEISSIVFNLEKWAFDTYPELSARVDREEKVDFKSILKILLNNKNINKEQSDILRKIRNAFDHNNYPDKGVVEIKALPEIAMSIKKAFGEYAIMK

SEQ ID NO: 88 - protein, 1150 aa, Flavobacterium branchiophilum
MENLNKILDKENEICISKIFNTKGIAAPITEKALDNIKSKQKNDLNKEARLHYFSIGHSFKQIDTKKVFDYVLIEELKDEKPLKFITLQKDFFTKEFSIKLQKLINSIRNINNHYVHNFNDINLNKIDSNVFHFLKESFELAIIEKYYKVNKKYPLDNEIVLFLKELFIKDENTALLNYFTNLSKDEAIEYILTFTITENKIWNINNEHNILNIEKGKYLTFEAMLFLITIFLYKNEANHLLPKLYDFKNNKSKQELFTFFSKKFTSQDIDAEEGHLIKFRDMIQYLNHYPTAWNNDLKLESENKNKIMTTKLIDSIIEFELNSNYPSFATDIQFKKEAKAFLFASNKKRNQTSFSNKSYNEEIRHNPHIKQYRDEIASALTPISFNVKEDKFKIFVKKHVLEEYFPNSIGYEKFLEYNDFTEKEKEDFGLKLYSNPKTNKLIERIDNHKLVKSHGRNQDRFMDFSMRFLAENNYFGKDAFFKCYKFYDTQEQDEFLQSNENNDDVKFHKGKVTTYIKYEEHLKNYSYWDCPFVEENNSMSVKISIGSEEKILKIQRNLMIYFLENALYNENVENQGYKLVNNYYRELKKDVEESIASLDLIKSNPDFKSKYKKILPKRLLHNYAPAKQDKAPENAFETLLKKADFREEQYKKLLKKAEHEKNKEDFVKRNKGKQFKLHFIRKACQMMYFKEKYNTLKEGNAAFEKKDPVIEKRKNKEHEFGHHKNLNITREEFNDYCKWMFAFNGNDSYKKYLRDLFSEKHFFDNQEYKNLFESSVNLEAFYAKTKELFKKWIETNKPTNNENRYTLENYKNLILQKQVFINVYHFSKYLIDKNLLNSENNVIQYKSLENVEYLISDFYFQSKLSIDQYKTCGKLFNKLKSNKLEDCLLYEIAYNYIDKKNVHKIDIQKILTSKIILTINDANTPYKISVPFNKLERYTEMIAIKNQNNLKARFLIDLPLYLSKNKIKKGKDSAGYEIIIKNDLEIEDINTINNKIINDSVKFTEVLMELEKYFILKDKCILSKNYIDNSEIPSLKQFSKVWIKENENEIINYRNIACHFHLPLLETFDNLLLNVEQKFIKEELQNVSTINDLSKPQEYLILLFIKFKHNNFYLNLFNKNESKTIKNDKEVKKNRVLQKFINQVILKKK

SEQ ID NO: 89 - protein, 1159 aa, Myroides odoratimimus
MKDILTTDTTEKQNRFYSHKIADKYFFGGYFNLASNNIYEVFEEVNKRNTFGKLAKRDNGNLKNYIIHVFKDELSISDFEKRVAIFASYFPILETVDKKSIKERNRTIDLTLSQRIRQFREMLISLVTAVDQLRNFYTHYHHSDIVIENKVLDFLNSSFVSTALHVKDKYLKTDKTKEFLKETIAAELDILIEAYKKKQIEKKNTRFKANKREDILNAIYNEAFWSFINDKDKDKDKETVVAKGADAYFEKNHHKSNDPDFALNISEKGIVYLLSFFLTNKEMDSLKANLTGFKGKVDRESGNSIKYMATQRIYSFHTYRGLKQKIRTSEEGVKETLLMQMIDELSKVPNVVYQHLSTTQQNSFIEDWNEYYKDYEDDVETDDLSRVTHPVIRKRYEDRFNYFAIRFLDEFFDFPTLRFQVHLGDYVHDRRTKQLGKVESDRIIKEKVTVFARLKDINSAKASYFHSLEEQDKEELDNKWTLFPNPSYDFPKEHTLQHQGEQKNAGKIGIYVKLRDTQYKEKAALEEARKSLNPKERSATKASKYDIITQIIEANDNVKSEKPLVFTGQPIAYLSMNDIHSMLFSLLTDNAELKKTPEEVEAKLIDQIGKQINEILSKDTDTKILKKYKDNDLKETDTDKITRDLARDKEEIEKLILEQKQRADDYNYTSSTKFNIDKSRKRKHLLFNAEKGKIGVWLANDIKRFMFKESKSKWKGYQHIELQKLFAYFDTSKSDLELILSNMVMVKDYPIELIDLVKKSRTLVDFLNKYLEARLEYIENVITRVKNSIGTPQFKTVRKECFTFLKKSNYTVVSLDKQVERILSMPLFIERGFMDDKPTMLEGKSYKQHKEKFADWFVHYKENSNYQNFYDTEVYEITTEDKREKAKVTKKIKQQQKNDVFTLMMVNYMLEEVLKLSSNDRLSLNELYQTKEERIVNKQVAKDTQERNKNYIWNKVVDLQLCDGLVHIDNVKLKDIGNFRKYENDSRVKEFLTYQSDIVWSAYLSNEVDSNKLYVIERQLDNYESIRSKELLKEVQEIECSVYNQVANKESLKQSGNENFKQYVLQGLLPIGMDVREMLILSTDVKFKKEEIIQLGQAGEVEQDLYSLIYIRNKFAHNQLPIKEFFDFCENNYRSISDNEYYAEYYMEIFRSIKEKYAN

SEQ ID NO: 90 - protein, 1214 aa, Flavobacterium columnare
MSSKNESYNKQKTFNHYKQEDKYFFGGFLNNADDNLRQVGKEFKTRINFNHNNNELASVFKDYFNKEKSVAKREHALNLLSNYFPVLERIQKHTNHNFEQTREIFELLLDTIKKLRDYYTHHYHKPITINPKIYDFLDDTLLDVLITIKKKKVKNDTSRELLKEKLRPELTQLKNQKREELIKKGKKLLEENLENAVFNHCLIPFLEENKTDDKQNKTVSLRKYRKSKPNEETSITLTQSGLVFLMSFFLHRKEFQVFTSGLERFKAKVNTIKEEEISLNKNNIVYMITHWSYSYYNFKGLKHRIKTDQGVSTLEQNNTTHSLTNTNTKEALLTQIVDYLSKVPNEIYETLSEKQQKEFEEDINEYMRENPENEDSTFSSIVSHKVIRKRYENKFNYFAMRFLDEYAELPTLRFMVNFGDYIKDRQKKILESIQFDSERIIKKEIHLFEKLSLVTEYKKNVYLKETSNIDLSRFPLFPNPSYVMANNNIPFYIDSRSNNLDEYLNQKKKAQSQNKKRNLTFEKYNKEQSKDAIIAMLQKEIGVKDLQQRSTIGLLSCNELPSMLYEVIVKDIKGAELENKIAQKIREQYQSIRDFTLDSPQKDNIPTTLIKTINTDSSVTFENQPIDIPRLKNALQKELTLTQEKLLNVKEHEIEVDNYNRNKNTYKFKNQPKNKVDDKKLQRKYVFYRNEIRQEANWLASDLIHFMKNKSLWKGYMHNELQSFLAFFEDKKNDCIALLETVFNLKEDCILTKGLKNLFLKHGNFIDFYKEYLKLKEDFLSTESTFLENGFIGLPPKILKKELSKRLKYIFIVFQKRQFIIKELEEKKNNLYADAINLSRGIFDEKPTMIPFKKPNPDEFASWFVASYQYNNYQSFYELTPDIVERDKKKKYKNLRAINKVKIQDYYLKLMVDTLYQDLFNQPLDKSLSDFYVSKAEREKIKADAKAYQKLNDSSLWNKVIHLSLQNNRITANPKLKDIGKYKRALQDEKIATLLTYDARTWTYALQKPEKENENDYKELHYTALNMELQEYEKVRSKELLKQVQELEKKILDKFYDFSNNASHPEDLEIEDKKGKRHPNFKLYITKALLKNESEIINLENIDIEILLKYYDYNTEELKEKIKNMDEDEKAKIINTKENYNKITNVLIKKALVLIIIRNKMAHNQYPPKFIYDLANRFVPKKEEEYFATYFNRVFETITKELWENKEKKDKTQV

SEQ ID NO: 91 - protein, 1119 aa, Porphyromonas gingivalis
MTEQNEKPYNGTYYTLEDKHFWAAFLNLARHNAYITLAHIDRQLAYSKADITNDEDILFFKGQWKNLDNDLERKARLRSLILKHFSFLEGAAYGKKLFESQSSGNKSSKKKELSKKEKEELQANALSLDNLKSILFDFLQKLKDFRNYYSHYRHPESSELPLFDGNMLQRLYNVFDVSVQRVKRDHEHNDKVDPHRHFNHLVRKGKKDKYGNNDNPFFKHHFVDREGTVTEAGLLFFVSLFLEKRDAIWMQKKIRGFKGGTEAYQQMTNEVFCRSRISLPKLKLESLRTDDWMLLDMLNELVRCPKSLYDRLREEDRARFRVPVDILSDEDDTDGTEEDPFKNTLVRHQDRFPYFALRYFDLKKVFTSLRFHIDLGTYHFAIYKKNIGEQPEDRHLTRNLYGFGRIQDFAEEHRPEEWKRLVRDLDYFETGDKPYITQTTPHYHIEKGKIGLRFVPEGQHLWPSPEVGATRTGRSKYAQDKRLTAEAFLSVHELMPMMFYYFLLREKYSEEVSAEKVQGRIKRVIEDVYAVYDAFARDEINTRDELDACLADKGIRRGHLPRQMIAILSQEHKDMEEKVRKKLQEMIADTDHRLDMLDRQTDRKIRIGRKNAGLPKSGVVADWLVRDMMRFQPVAKDTSGKPLNNSKANSTEYRMLQRALALFGGEKERLTPYFRQMNLTGGNNPHPFLHETRWESHTNILSFYRSYLEARKAFLQSIGRSDRVENHRFLLLKEPKTDRQTLVAGWKGEFHLPRGIFTEAVRDCLIEMGYDEVGSYKEVGFMAKAVPLYFERASKDRVQPFYDYPFNVGNSLKPKKGRFLSKEKRAEEWESGKERFRLAKLKKEILEAKEHPYHDFKSWQKFERELRLVKNQDIITWMMCRDLMEENKVEGLDTGTLYLKDIRTDVQEQGSLNVLNRVKPMRLPVVVYRADSRGHVHKEQAPLATVYIEERDTKLLKQGNFKSFVKDRRLNGLFSFVDTGALAMEQYPISKLRVEYELAKYQTARVCAFEQTLELEESLLTRYPHLPDKNFRKMLESWSDPLLDKWPDLHGNVRLLIAVRNAFSHNQYPMYDETLFSSIRKYDPSSPDAIEERMGLNIAHRLSEEVKQAKEMVERIIQA

SEQ ID NO: 92 - protein, 1175 aa, Porphyromonas sp.
MTEQSERPYNGTYYTLEDKHFWAAFLNLARHNAYITLTHIDRQLAYSKADITNDQDVLSFKALWKNFDNDLERKSRLRSLILKHFSFLEGAAYGKKLFESKSSGNKSSKNKELTKKEKEELQANALSLDNLKSILFDFLQKLKDFRNYYSHYRHSESSELPLFDGNMLQRLYNVFDVSVQRVKRDHEHNDKVDPHRHFNHLVRKGKKDRYGHNDNPSFKHHFVDSEGMVTEAGLLFFVSLFLEKRDAIWMQKKIRGFKGGTETYQQMTNEVFCRSRISLPKLKLESLRTDDWMLLDMLNELVRCPKPLYDRLREDDRACFRVPVDILPDEDDTDGGGEDPFKNTLVRHQDRFPYFALRYFDLKKVFTSLRFHIDLGTYHFAIYKKMIGEQPEDRHLTRNLYGFGRIQDFAEEHRPEEWKRLVRDLDYFETGDKPYISQTTPHYHIEKGKIGLRFVPEGQHLWPSPEVGTTRTGRSKYAQDKRLTAEAFLSVHELMPMMFYYFLLREKYSEEVSAEKVQGRIKRVIEDVYAIYDAFARDEINTLKELDACLADKGIRRGHLPKQMIGILSQERKDMEEKVRKKLQEMIADTDHRLDMLDRQTDRKIRIGRKNAGLPKSGVIADWLVRDMMRFQPVAKDTSGKPLNNSKANSTEYRMLQRALALFGGEKERLTPYFRQMNLTGGNNPHPFLHETRWESHTNILSFYRSYLRARKAFLERIGRSDRVENCPFLLLKEPKTDRQTLVAGWKGEFHLPRGIFTEAVRDCLIEMGYDEVGSYREVGFMAKAVPLYFERACEDRVQPFYDSPFNVGNSLKPKKGRFLSKEDRAEEWERGKERFRDLEAWSHSAARRIKDAFAGIEYASPGNKKKIEQLLRDLSLWEAFESKLKVRADKINLAKLKKEILEAQEHPYHDFKSWQKFERELRLVKNQDIITWMMCRDLMEENKVEGLDTGTLYLKDIRPNVQEQGSLNVLNRVKPMRLPVVVYRADSRGHVHKEEAPLATVYIEERDTKLLKQGNFKSFVKDRRLNGLFSFVDTGGLAMEQYPISKLRVEYELAKYQTARVCVFELTLRLEESLLSRYPHLPDESFREMLESWSDPLLAKWPELHGKVRLLIAVRNAFSHNQYPMYDEAVFSSIRKYDPSSPDAIEERMGLNIAHRLSEEVKQAKETVERIIQA

SEQ ID NO: 93 - protein, 1132 aa, Prevotella intermedia
MEDDKKTKESTNMLDNKHFWAAFLNLARHNVYITVNHINKVLELKNKKDQDIIIDNDQDILAIKTHWEKVNGDLNKTERLRELMTKHFPFLETAIYTKNKEDKEEVKQEKQAKAQSFDSLKHCLFLFLEKLQEARNYYSHYKYSESTKEPMLEKELLKKMYNIFDDNIQLVIKDYQHNKDINPDEDFKHLDRTEEEFNYYFTTNKKGNITASGLLFFVSLFLEKKDAIWMQQKLRGFKDNRESKKKMTHEVFCRSRMLLPKLRLESTQTQDWILLDMLNELIRCPKSLYERLQGEYRKKFNVPFDSADEDYDAEQEPFKNTLVRHQDRFPYFALRYFDYNEIFTNLRFQIDLGTYHFSIYKKLIGGQKEDRHLTHKLYGFERIQEFAKQNRTDEWKAIVKDFDTYETSEEPYISETAPHYHLENQKIGIRFRNDNDEIWPSLKTNGENNEKRKYKLDKQYQAEAFLSVHELLPMMFYYLLLKKEEPNNDKKNASIVEGFIKREIRDIYKLYDAFANGEINNIDDLEKYCEDKGIPKRHLPKQMVAILYDEHKDMAEEAKRKQKEMVKDTKKLLATLEKQTQGEIEDGGRNIRLLKSGEIARWLVNDMMRFQPVQKDNEGNPLNNSKANSTEYQMLQRSLALYNKEEKPTRYFRQVNLINSSNPHPFLKWTKWEECNNILSFYRSYLTKKIEFLNKLKPEDWEKNQYFLKLKEPKTNRETLVQGWKNGFNLPRGIFTEPIREWFKRHQNDSEEYEKVETLDRVGLVTKVIPLFFKKEDSKDKEEYLKKDAQKEINNCVQPFYGFPYNVGNIHKPDEKDFLPSEERKKLWGDKKYKFKGYKAKVKSKKLTDKEKEEYRSYLEFQSWNKFERELRLVRNQDIVTWLLCTELIDKLKVEGLNVEELKKLRLKDIDTDTAKQEKNNILNRVMPMQLPVTVYEIDDSHNIVKDRPLHTVYIEETKTKLLKQGNFKALVKDRRLNGLFSFVDTSSETELKSNPISKSLVEYELGEYQNARIETIKDMLLLEETLIEKYKTLPTDNFSDMLNGWLEGKDEADKARFQNDVKLLVAVRNAFSHNQYPMRNRIAFANINPFSLSSADTSEEKKLDIANQLKDKTHKIIKRIIEIEKPIETKE

SEQ ID NO: 94 - protein, 1134 aa, Prevotella intermedia
MKMEDDKKTKESTNMLDNKHFWAAFLNLARHNVYITVNHINKVLELKNKKDQDIIIDNDQDILAIKTHWEKVNGDLNKTERLRELMTKHFPFLETAIYTKNKEDKEEVKQEKQAKAQSFDSLKHCLFLFLEKLQEARNYYSHYKYSESTKEPMLEKELLKKMYNIFDDNIQLVIKDYQHNKDINPDEDFKHLDRTEEEFNYYFTTNKKGNITASGLLFFVSLFLEKKDAIWMQQKLRGFKDNRESKKKMTHEVFCRSRMLLPKLRLESTQTQDWILLDMLNELIRCPKSLYERLQGEYRKKFNVPFDSADEDYDAEQEPFKNTLVRHQDRFPYFALRYFDYNEIFTNLRFQIDLGTYHFSIYKKLIGGQKEDRHLTHKLYGFERIQEFAKQNRTDEWKAIVKDFDTYETSEEPYISETAPHYHLENQKIGIRFRNDNDEIWPSLKTNGENNEKRKYKLDKQYQAEAFLSVHELLPMMFYYLLLKKEEPNNDKKNASIVEGFIKREIRDIYKLYDAFANGEINNIDDLEKYCEDKGIPKRHLPKQMVAILYDEHKDMAEEAKRKQKEMVKDTKKLLATLEKQTQGEIEDGGRNIRLLKSGEIARWLVNDMMRFQPVQKDNEGNPLNNSKANSTEYQMLQRSLALYNKEEKPTRYFRQVNLINSSNPHPFLKWTKWEECNNILSFYRSYLTKKIEFLNKLKPEDWEKNQYFLKLKEPKTNRETLVQGWKNGFNLPRGIFTEPIREWFKRHQNDSEEYEKVETLDRVGLVTKVIPLFFKKEDSKDKEEYLKKDAQKEINNCVQPFYGFPYNVGNIHKPDEKDFLPSEERKKLWGDKKYKFKGYKAKVKSKKLTDKEKEEYRSYLEFQSWNKFERELRLVRNQDIVTWLLCTELIDKLKVEGLNVEELKKLRLKDIDTDTAKQEKNNILNRVMPMQLPVTVYEIDDSHNIVKDRPLHTVYIEETKTKLLKQGNFKALVKDRRLNGLFSFVDTSSETELKSNPISKSLVEYELGEYQNARIETIKDMLLLEETLIEKYKTLPTDNFSDMLNGWLEGKDEADKARFQNDVKLLVAVRNAFSHNQYPMRNRIAFANINPFSLSSADTSEEKKLDIANQLKDKTHKIIKRIIEIEKPIETKE

SEQ ID NO: 95 - protein, 1133 aa, Prevotella intermedia
MEDDKKTTDSISYELKDKHFWAAFLNLARHNVYITVNHINKVLELKNKKDQDIIIDNDQDILAIKTHWEKVNGDLNKTERLRELMTKHFPFLETAIYSKNKEDKEEVKQEKQAKAQSFDSLKHCLFLFLEKLQETRNYYSHYKYSESTKEPMLEKELLKKMYNIFDDNIQLVIKDYQHNKDINPDEDFKHLDRTEEDFNYYFTRNKKGNITESGLLFFVSLFLEKKDAIWMQQKLRGFKDNRESKKKMTHEVFCRSRMLLPKLRLESTQTQDWILLDMLNELIRCPKSLYERLQGEDREKFKVPFDPADEDYDAEQEPFKNTLVRHQDRFPYFALRYFDYNEIFTNLRFQIDLGTFHFSIYKKLIGGQKEDRHLTHKLYGFERIQEFAKQNRPDEWKAIVKDLDTYETSNERYISETTPHYHLENQKIGIRFRNDNDEIWPSLKTNGENNEKSKYKLDKQYQAEAFLSVHELLPMMFYYLLLKKEEPNNDKKNASIVEGFIKREIRDMYKLYDAFANGEINNIDDLEKYCEDKGIPKRHLPKQMVAILYDEHKDMVKEAKRKQRKMVKDTEKLLAALEKQTQEKTEDGGRNIRLLKSGEIARWLVNDMMRFQPVQKDNEGNPLNNSKANSTEYQMLQRSLALYNKEEKPTRYFRQVNLINSSNPHPFLKWTKWEECNNILSFYRSYLTKKIEFLNKLKPEDWEKNQYFLKLKEPKTNRETLVQGWKNGFNLPRGIFTEPIREWFKRHQNDSKEYEKVEALDRVGLVTKVIPLFFKKEDSKDKEEDLKKDAQKEINNCVQPFYSFPYNVGNIHKPDEKDFLHREERIELWDKKKDKFKGYKAKVKSKKLTDKEKEEYRSYLEFQSWNKFERELRLVRNQDIVTWLLCTELIDKLKVEGLNVEELKKLRLKDIDTDTAKQEKNNILNRVMPMQLPVTVYEIDDSHNIVKDRPLHTVYIEETKTKLLKQGNFKALVKDRRLNGLFSFVDTSSEAELKSNPISKSLVEYELGEYQNARIETIKDMLLLEETLIEKYKNLPTDNFSDMLNGWLEGKDEADKARFQNDVKLLVAVRNAFSHNQYPMRNRIAFANINPFSLSSADTSEEKKLDIANQLKDKTHKIIKRIIEIEKPIETKE

SEQ ID NO: 96 - protein, 1127 aa, Prevotella buccae; identical to SEQ ID NO: 74

SEQ ID NO: 97 - protein, 1125 aa, Prevotella pallens
MKEEEKGKTPVVSTYNKDDKHFWAAFLNLARHNVYITVNHINKILGEGEINRDGYENTLEKSWNEIKDINKKDRLSKLIIKHFPFLEVTTYQRNSADTTKQKEEKQAEAQSLESLKKSFFVFIYKLRDLRNHYSHYKHSKSLERPKFEEDLQEKMYNIFDASIQLVKEDYKHNTDIKTEEDFKHLDRKGQFKYSFADNEGNITESGLLFFVSLFLEKKDAIWVQKKLEGFKCSNESYQKMTNEVFCRSRMLLPKLRLQSTQTQDWILLDMLNELIRCPKSLYERLREEDRKKFRVPIEIADEDYDAEQEPFKNALVRHQDRFPYFALRYFDYNEIFTNLRFQIDLGTYHFSIYKKQIGDYKESHHLTHKLYGFERIQEFTKQNRPDEWRKFVKTFNSFETSKEPYIPETTPHYHLENQKIGIRFRNDNDKIWPSLKTNSEKNEKSKYKLDKSFQAEAFLSVHELLPMMFYYLLLKTENTDNDNEIETKKKENKNDKQEKHKIEEIIENKITEIYALYDAFANGKINSIDKLEEYCKGKDIEIGHLPKQMIAILKSEHKDMATEAKRKQEEMLADVQKSLESLDNQINEEIENVERKNSSLKSGEIASWLVNDMMRFQPVQKDNEGNPLNNSKANSTEYQMLQRSLALYNKEEKPTRYFRQVNLIESSNPHPFLNNTEWEKCNNILSFYRSYLEAKKNFLESLKPEDWEKNQYFLMLKEPKTNCETLVQGWKNGFNLPRGIFTEPIRKWFMEHRKNITVAELKRVGLVAKVIPLFFSEEYKDSVQPFYNYLFNVGNINKPDEKNFLNCEERRELLRKKKDEFKKMTDKEKEENPSYLEFQSWNKFERELRLVRNQDIVTWLLCMELFNKKKIKELNVEKIYLKNINTNTTKKEKNTEEKNGEEKIIKEKNNILNRIMPMRLPIKVYGRENFSKNKKKKIRRNTFFTVYIEEKGTKLLKQGNFKALERDRRLGGLFSFVKTHSKAESKSNTISKSRVEYELGEYQKARIEIIKDMLALEETLIDKYNSLDTDNFHNMLTGWLKLKDEPDKASFQNDVDLLIAVRNAFSHNQYPMRNRIAFANINPFSLSSANTSEEKGLGIANQLKDKTHKTIEKIIEIEKPIETKE

SEQ ID NO: 98 - protein, 1157 aa, Myroides odoratimimus
MKDILTTDTTEKQNRFYSHKIADKYFFGGYFNLASNNIYEVFEEVNKRNTFGKLAKRDNGNLKNYIIHVFKDELSISDFEKRVAIFASYFPILETVDKKSIKERNRTIDLTLSQRIRQFREMLISLVTAVDQLRNFYTHYHHSEIVIENKVLDFLNSSLVSTALHVKDKYLKTDKTKEFLKETIAAELDILIEAYKKKQIEKKNTRFKANKREDILNAIYNEAFWSFINDKDKDKETVVAKGADAYFEKNHHKSNDPDFALNISEKGIVYLLSFFLTNKEMDSLKANLTGFKGKVDRESGNSIKYMATQRIYSFHTYRGLKQKIRTSEEGVKETLLMQMIDELSKVPNVVYQHLSTTQQNSFIEDWNEYYKDYEDDVETDDLSRVIHPVIRKRYEDRFNYFAIRFLDEFFDFPTLRFQVHLGDYVHDRRTKQLGKVESDRIIKEKVTVFARLKDINSAKANYFHSLEEQDKEELDNKWTLFPNPSYDFPKEHTLQHQGEQKNAGKIGIYVKLRDTQYKEKAALEEARKSLNPKERSATKASKYDIITQIIEANDNVKSEKPLVFTGQPIAYLSMNDIHSMLFSLLTDNAELKKTPEEVEAKLIDQIGKQINEILSKDTDTKILKKYKDNDLKETDTDKITRDLARDKEEIEKLILEQKQRADDYNYTSSTKFNIDKSRKRKHLLFNAEKGKIGVWLANDIKRFMTEEFKSKWKGYQHTELQKLFAYYDTSKSDLDLILSDMVMVKDYPIELIALVKKSRTLVDFLNKYLEARLGYMENVITRVKNSIGTPQFKTVRKECFTFLKKSNYTVVSLDKQVERILSMPLFIERGFMDDKPTMLEGKSYQQHKEKFADWFVHYKENSNYQNFYDTEVYEITTEDKREKAKVTKKIKQQQKNDVFTLMMVNYMLEEVLKLSSNDRLSLNELYQTKEERIVNKQVAKDTQERNKNYIWNKVVDLQLCEGLVRIDKVKLKDIGNFRKYENDSRVKEFLTYQSDIVWSAYLSNEVDSNKLYVIERQLDNYESIRSKELLKEVQEIECSVYNQVANKESLKQSGNENFKQYVLQGLVPIGMDVREMLILSTDVKFIKEEIIQLGQAGEVEQDLYSLIYIRNKFAHNQLPIKEFFDFCENNYRSISDNEYYAEYYMEIFRSIKEKYTS

SEQ ID NO: 99 - protein, 1157 aa, Myroides odoratimimus
MKDILTTDTTEKQNRFYSHKIADKYFFGGYFNLASNNIYEVFEEVNKRNTFGKLAKRDNGNLKNYIIHVFKDELSISDFEKRVAIFASYFPILETVDKKSIKERNRTIDLTLSQRIRQFREMLISLVTAVDQLRNFYTHYHHSEIVIENKVLDFLNSSLVSTALHVKDKYLKTDKTKEFLKETIAAELDILIEAYKKKQIEKKNTRFKANKREDILNAIYNEAFWSFINDKDKDKETVVAKGADAYFEKNHHKSNDPDFALNISEKGIVYLLSFFLTNKEMDSLKANLTGFKGKVDRESGNSIKYMATQRIYSFHTYRGLKQKIRTSEEGVKETLLMQMIDELSKVPNVVYQHLSTTQQNSFIEDWNEYYKDYEDDVETDDLSRVIHPVIRKRYEDRFNYFAIRFLDEFFDFPTLRFQVHLGDYVHDRRTKQLGKVESDRIIKEKVTVFARLKDINSAKASYFHSLEEQDKEELDNKWTLFPNPSYDFPKEHTLQHQGEQKNAGKIGIYVKLRDTQYKEKAALEEARKSLNPKERSATKASKYDIITQIIEANDNVKSEKPLVFTGQPIAYLSMNDIHSMLFSLLTDNAELKKTPEEVEAKLIDQIGKQINEILSKDTDTKILKKYKDNDLKETDTDKITRDLARDKEEIEKLILEQKQRADDYNYTSSTKFNIDKSRKRKHLLFNAEKGKIGVWLANDIKRFMFKESKSKWKGYQHTELQKLFAYFDTSKSDLELILSDMVMVKDYPIELIDLVRKSRTLVDFLNKYLEARLGYIENVITRVKNSIGTPQFKTVRKECFAFLKESNYTVASLDKQIERILSMPLFIERGFMDSKPTMLEGKSYQQHKEDFADWFVHYKENSNYQNFYDTEVYEIITEDKREQAKVTKKIKQQQKNDVFTLMMVNYMLEEVLKLPSNDRLSLNELYQTKEERIVNKQVAKDTQERNKNYIWNKVVDLQLCEGLVRIDKVKLKDIGNFRKYENDSRVKEFLTYQSDIVWSGYLSNEVDSNKLYVIERQLDNYESIRSKELLKEVQEIECIVYNQVANKESLKQSGNENFKQYVLQGLLPRGTDVREMLILSTDVKFKKEEIMQLGQVREVEQDLYSLIYIRNKFAHNQLPIKEFFDFCENNYRPISDNEYYAEYYMEIFRSIKEKYAS

SEQ ID NO: 100 - protein, 1224 aa, Bergeyella zoohelcum; identical to SEQ ID NO: 72

SEQ ID NO: 101 - protein, 1150 aa, Prevotella saccharolytica
MMEKENVQGSHIYYEPTDKCFWAAFYNLARHNAYLTIAHINSFVNSKKGINNDDKVLDIIDDWSKFDNDLLMGARLNKLILKHFPFLKAPLYQLAKRKTRKQQGKEQQDYEKKGDEDPEVIQEAIANAFKMANVRKTLHAFLKQLEDLRNHFSHYNYNSPAKKMEVKFDDGFCNKLYYVFDAALQMVKDDNRMNPEINMQTDFEHLVRLGRNRKIPNTFKYNFTNSDGTINNNGLLFFVSLFLEKRDAIWMQKKIKGFKGGTENYMRMTNEVFCRNRMVIPKLRLETDYDNHQLMFDMLNELVRCPLSLYKRLKQEDQDKFRVPIEFLDEDNEADNPYQENANSDENPTEETDPLKNTLVRHQHRFPYFVLRYFDLNEVFKQLRFQINLGCYHFSIYDKTIGERTEKRHLTRTLFGFDRLQNFSVKLQPEHWKNMVKHLDTEESSDKPYLSDAMPHYQIENEKIGIHFLKTDTEKKETVWPSLEVEEVSSNRNKYKSEKNLTADAFLSTHELLPMMFYYQLLSSEEKTRAAAGDKVQGVLQSYRKKIFDIYDDFANGTINSMQKLDERLAKDNLLRGNMPQQMLAILEHQEPDMEQKAKEKLDRLITETKKRIGKLEDQFKQKVRIGKRRADLPKVGSIADWLVNDMMRFQPAKRNADNTGVPDSKANSTEYRLLQEALAFYSAYKDRLEPYFRQVNLIGGTNPHPFLHRVDWKKCNHLLSFYHDYLEAKEQYLSHLSPADWQKHQHFLLLKVRKDIQNEKKDWKKSLVAGWKNGFNLPRGLFTESIKTWFSTDADKVQITDTKLFENRVGLIAKLIPLYYDKVYNDKPQPFYQYPFNINDRYKPEDTRKRFTAASSKLWNEKKMLYKNAQPDSSDKIEYPQYLDFLSWKKLERELRMLRNQDMMVWLMCKDLFAQCTVEGVEFADLKLSQLEVDVNVQDNLNVLNNVSSMILPLSVYPSDAQGNVLRNSKPLHTVYVQENNTKLLKQGNFKSLLKDRRLNGLFSFIAAEGEDLQQHPLTKNRLEYELSIYQTMRISVFEQTLQLEKAILTRNKTLCGNNFNNLLNSWSEHRTDKKTLQPDIDFLIAVRNAFSHNQYPMSTNTVMQGIEKFNIQTPKLEEKDGLGIASQLAKKTKDAASRLQNIINGGTN

SEQ ID NO: 102 - protein, 1175 aa, Porphyromonas gingivalis
MTEQNEKPYNGTYYTLEDKHFWAAFFNLARHNAYITLTHIDRQLAYSKADITNDEDILFFKGQWKNLDNDLERKARLRSLILKHFSFLEGAAYGKKLFESQSSGNKSSKKKELTKKEKEELQANALSLDNLKSILFDFLQKLKDFRNYYSHYRHPESSELPLFDGNMLQRLYNVFDVSVQRVKRDHEHNDKVDPHRHFNHLVRKGKKDRCGNNDNPFFKHHFVDREEKVTEAGLLFFVSLFLEKRDAIWMQKKIRGFKGGTETYQQMTNEVFCRSRISLPKLKLESLRTDDWMLLDMLNELVRCPKSLYDRLREEDRARFRVPVDILSDEDDTDGTEEDPFKNTLVRHQDRFPYFALRYFDLKKVFTSLRFHIDLGTYHFAIYKKNIGEQPEDRHLTRNLYGFGRIQDFAEEHRPEEWKRLVRDLDYFETGDKPYITQTTPHYHIEKGKIGLRFVPEGQLLWPSPEVGATRTGRSKYAQDKRFTAEAFLSVHELMPMMFYYFLLREKYSEEASAERVQGRIKRVIEDVYAVYDAFARGEIDTLDRLDACLADKGIRRGHLPRQMIAILSQEHKDMEEKVRKKLQEMIADTDHRLDMLDRQTDRKIRIGRKNAGLPKSGVIADWLVRDMMRFQPVAKDTSGKPLNNSKANSTEYRMLQRALALFGGEKERLTPYFRQMNLTGGNNPHPFLHETRWESHTNILSFYRSYLKARKAFLQSIGRSDRVENHRFLLLKEPKTDRQTLVAGWKGEFHLPRGIFTEAVRDCLIEMGLDEVGSYKEVGFMAKAVPLYFERACKDRVQPFYDYPFNVGNSLKPKKGRFLSKEKRAEEWESGKERFRDLEAWSHSAARRIEDAFAGIENASRENKKKIEQLLQDLSLWETFESKLKVKADKINIAKLKKEILEAKEHPYLDFKSWQKFERELRLVKNQDIITWMMCRDLMEENKVEGLDTGTLYLKDIRTDVHEQGSLNVLNRVKPMRLPVVVYRADSRGHVHKEQAPLATVYIEERDTKLLKQGNFKSFVKDRRLNGLFSFVDTGALAMEQYPISKLRVEYELAKYQTARVCAFEQTLELEESLLTRYPHLPDKNFRKMLESWSDPLLDKWPDLHGNVRLLIAVRNAFSHNQYPMYDETLFSSIRKYDPSSPDAIEERMGLNIAHRLSEEVKQAKEMVERIIQA

SEQ ID NO: 103 - protein, 1115 aa, Bacteroides pyogenes
MESIKNSQKSTGKTLQKDPPYFGLYLNMALLNVRKVENHIRKWLGDVALLPEKSGFHSLLTTDNLSSAKWTRFYYKSRKFLPFLEMFDSDKKSYENRRETTECLDTIDRQKISSLLKEVYGKLQDIRNAFSHYHIDDQSVKHTALIISSEMHRFIENAYSFALQKTRARFTGVFVETDFLQAEEKGDNKKFFAIGGNEGIKLKDNALIFLICLFLDREEAFKFLSRATGFKSTKEKGFLAVRETFCALCCRQPHERLLSVNPREALLMDMLNELNRCPDILFEMLDEKDQKSFLPLLGEEEQAHILENSLNDELCEAIDDPFEMIASLSKRVRYKNRFPYLMLRYIEEKNLLPFIRFRIDLGCLELASYPKKMGEENNYERSVTDHAMAFGRLTDFHNEDAVLQQITKGITDEVRFSLYAPRYAIYNNKIGFVRTGGSDKISFPTLKKKGGEGHCVAYTLQNTKSFGFISIYDLRKILLLSFLDKDKAKNIVSGLLEQCEKHWKDLSENLFDAIRTELQKEFPVPLIRYTLPRSKGGKLVSSKLADKQEKYESEFERRKEKLTEILSEKDFDLSQIPRRMIDEWLNVLPTSREKKLKGYVETLKLDCRERLRVFEKREKGEHPVPPRIGEMATDLAKDIIRMVIDQGVKQRITSAYYSEIQRCLAQYAGDDNRRHLDSIIRELRLKDTKNGHPFLGKVLRPGLGHTEKLYQRYFEEKKEWLEATFYPAASPKRVPRFVNPPTGKQKELPLIIRNLMKERPEWRDWKQRKNSHPIDLPSQLFENEICRLLKDKIGKEPSGKLKWNEMFKLYWDKEFPNGMQRFYRCKRRVEVFDKVVEYEYSEEGGNYKKYYEALIDEVVRQKISSSKEKSKLQVEDLTLSVRRVFKRAINEKEYQLRLLCEDDRLLFMAVRDLYDWKEAQLDLDKIDNMLGEPVSVSQVIQLEGGQPDAVIKAECKLKDVSKLMRYCYDGRVKGLMPYFANHEATQEQVEMELRHYEDHRRRVFNWVFALEKSVLKNEKLRRFYEESQGGCEHRRCIDALRKASLVSEEEYEFLVHIRNKSAHNQFPDLEIGKLPPNVTSGFCECIWSKYKAIICRIIPFIDPERRFFGKLLEQK

SEQ ID NO: 104 - protein, 1135 aa, Porphyromonas gingivalis
MNTVPASENKGQSRTVEDDPQYFGLYLNLARENLIEVESHVRIKFGKKKLNEESLKQSLLCDHLLSVDRWTKVYGHSRRYLPFLHYFDPDSQIEKDHDSKTGVDPDSAQRLIRELYSLLDFLRNDFSHNRLDGTTFEHLEVSPDISSFITGTYSLACGRAQSRFADFFKPDDFVLAKNRKEQLISVADGKECLTVSGLAFFICLFLDREQASGMLSRIRGFKRTDENWARAVHETFCDLCIRHPHDRLESSNTKEALLLDMLNELNRCPRILYDMLPEEERAQFLPALDENSMNNLSENSLNEESRLLWDGSSDWAEALTKRIRHQDRFPYLMLRFIEEMDLLKGIRFRVDLGEIELDSYSKKVGRNGEYDRTITDHALAFGKLSDFQNEEEVSRMISGEASYPVRFSLFAPRYAIYDNKIGYCHTSDPVYPKSKTGEKRALSNPRSMGFISVHDLRKLLLMELLCEGSFSRMQSDFLRKANRILDETAEGKLQFSALFPEMRHRFIPPQNPKSKDRREKAETTLEKYKQEIKGRKDKLNSQLLSAFDMDQRQLPSRLLDEWMNIRPASHSVKLRTYVKQLNEDCRLRLQKFRKDGDGKARAIPLVGEMATFLSQDIVRMIISEETKKLITSAYYNEMQRSLAQYAGEENRHQFRAIVAELRLLDPSSGHPFLSATMETAHRYTEDFYKCYLEKKREWLAKTFYRPEQDENTKRRISVFFVPDGEARKLLPLLIRRRMKEQNDLQDWIRNKQAHPIDLPSHLFDSKIMELLKVKDGKKKWNEAFKDWWSTKYPDGMQPFYGLRRELNIHGKSVSYIPSDGKKFADCYTHLMEKTVQDKKRELRTAGKPVPPDLAADIKRSFHRAVNEREFMLRLVQEDDRLMLMAINKMMTDREEDILPGLKNIDSILDEENQFSLAVHAKVLEKEGEGGDNSLSLVPATIEIKSKRKDWSKYIRYRYDRRVPGLMSHFPEHKATLDEVKTLLGEYDRCRIKIFDWAFALEGAIMSDRDLKPYLHESSSREGKSGEHSTLVKMLVEKKGCLTPDESQYLILIRNKAAHNQFPCAAEMPLIYRDVSAKVGSIEGSSAKDLPEGSSLVDSLWKKYEMIIRKILPILDPENRFFGKLLNNMSQPINDL

SEQ ID NO: 105 - protein, 1135 aa, Porphyromonas gingivalis
MNTVPASENKGQSRTVEDDPQYFGLYLNLARENLIEVESHVRIKFGKKKLNEESLKQSLLCDHLLSVDRWTKVYGHSRRYLPFLHYFDPDSQIEKDHDSKTGVDPDSAQRLIRELYSLLDFLRNDFSHNRLDGTTFEHLEVSPDISSFITGTYSLACGRAQSRFADFFKPDDFVLAKNRKEQLISVADGKECLTVSGLAFFICLFLDREQASGMLSRIRGFKRTDENWARAVHETFCDLCIRHPHDRLESSNTKEALLLDMLNELNRCPRILYDMLPEEERAQFLPALDENSMNNLSENSLNEESRLLWDGSSDWAEALTKRIRHQDRFPYLMLRFIEEMDLLKGIRFRVDLGEIELDSYSKKVGRNGEYDRTITDHALAFGKLSDFQNEEEVSRMISGEASYPVRFSLFAPRYAIYDNKIGYCHTSDPVYPKSKTGEKRALSNPQSMGFISVHDLRKLLLMELLCEGSFSRMQSGFLRKANRILDETAEGKLQFSALFPEMRHRFIPPQNPKSKDRREKAETTLEKYKQEIKGRKDKLNSQLLSAFDMNQRQLPSRLLDEWMNIRPASHSVKLRTYVKQLNEDCRLRLRKFRKDGDGKARAIPLVGEMATFLSQDIVRMIISEETKKLITSAYYNEMQRSLAQYAGEENRRQFRAIVAELHLLDPSSGHPFLSATMETAHRYTEDFYKCYLEKKREWLAKTFYRPEQDENTKRRISVFFVPDGEARKLLPLLIRRRMKEQNDLQDWIRNKQAHPIDLPSHLFDSKIMELLKVKDGKKKWNEAFKDWWSTKYPDGMQPFYGLRRELNIHGKSVSYIPSDGKKFADCYTHLMEKTVQDKKRELRTAGKPVPPDLAADIKRSFHRAVNEREFMLRLVQEDDRLMLMAINKMMTDREEDILPGLKNIDSILDEENQFSLAVHAKVLEKEGEGGDNSLSLVPATIEIKSKRKDWSKYIRYRYDRRVPGLMSHFPEHKATLDEVKTLLGEYDRCRIKIFDWAFALEGAIMSDRDLKPYLHESSSREGKSGEHSTLVKMLVEKKGCLTPDESQYLILIRNKAAHNQFPCAAEMPLIYRDVSAKVGSIEGSSAKDLPEGSSLVDSLWKKYEMIIRKILPILDHENRFFGKLLNNMSQPINDL

SEQ ID NO: 106 - protein, 1135 aa, Porphyromonas gingivalis
MNTVPASENKGQSRTVEDDPQYFGLYLNLARENLIEVESHVRIKFGKKKLNEESLKQSLLCDHLLSVDRWTKVYGHSRRYLPFLHYFDPDSQIEKDHDSKTGVDPDSAQRLIRELYSLLDFLRNDFSHNRLDGTTFEHLEVSPDISSFITGTYSLACGRAQSRFADFFKPDDFVLAKNRKEQLISVADGKECLTVSGLAFFICLFLDREQASGMLSRIRGFKRTDENWARAVHETFCDLCIRHPHDRLESSNTKEALLLDMLNELNRCPRILYDMLPEEERAQFLPALDENSMNNLSENSLNEESRLLWDGSSDWAEALTKRIRHQDRFPYLMLRFIEEMDLLKGIRFRVDLGEIELDSYSKKVGRNGEYDRTITDHALAFGKLSDFQNEEEVSRMISGEASYPVRFSLFAPRYAIYDNKIGYCHTSDPVYPKSKTGEKRALSNPRSMGFISVHDLRKLLLMELLCEGSFSRMQSDFLRKANRILDETAEGKLQFSALFPEMRHRFIPPQNPKSKDRREKAETTLEKYKQEIKGRKDKLNSQLLSAFDMDQRQLPSRLLDEWMNIRPASHSVKLRTYVKQLNEDCRLRLQKFRKDGDGKARAIPLVGEMATFLSQDIVRMIISEETKKLITSAYYNEMQRSLAQYAGEENRHQFRAIVAELRLLDPSSGHPFLSATMETAHRYTEDFYKCYLEKKREWLAKTFYRPEQDENTKRRISVFFVPDGEARKLLPLLIRRRMKEQNDLQDWIRNKQAHPIDLPSHLFDSKVMELLKVKDGKKKWNEAFKDWWSTKYPDGMQPFYGLRRELNIHGKSVSYIPSDGKKFADCYTHLMEKTVRDKKRELRTAGKPVPPDLAAYIKRSFHRAVNEREFMLRLVQEDDRLMLMAINKIMTDREEDILPGLKNIDSILDKENQFSLAVHAKVLEKEGEGGDNSLSLVPATIEIKSKRKDWSKYIRYRYDRRVPGLMSHFPEHKATLDEVKTLLGEYDRCRIKIFDWAFALEGAIMSDRDLKPYLHESSSREGKSGEHSTLVKMLVEKKGCLTPDESQYLILIRNKAAHNQFPCAAEIPLIYRDVSAKVGSIEGSSAKDLPEGSSLVDSLWKKYEMIIRKILPILDPENRFFGKLLNNMSQPINDL

SEQ ID NO: 107 - protein, 1125 aa, Prevotella intermedia
MKMEDDKKTTESTNMLDNKHFWAAFLNLARHNVYITVNHINKVLELKNKKDQDIIIDNDQDILAIKTHWEKVNGDLNKTERLRELMTKHFPFLETAIYTKNKEDKEEVKQEKQAEAQSLESLKDCLFLFLEKLQEARNYYSHYKYSESTKEPMLEEGLLEKMYNIFDDNIQLVIKDYQHNKDINPDEDFKHLDRKGQFKYSFADNEGNITESGLLFFVSLFLEKKDAIWMQQKLTGFKDNRESKKKMTHEVFCRRRMLLPKLRLESTQTQDWILLDMLNELIRCPKSLYERLQGEYRKKFNVPFDSADEDYDAEQEPFKNTLVRHQDRFPYFALRYFDYNEIFTNLRFQIDLGTYHFSIYKKLIGGQKEDRHLTHKLYGFERIQEFAKQNRPDEWKALVKDLDTYETSNERYISETTPHYHLENQKIGIRFRNGNKEIWPSLKTNGENNEKSKYKLDKPYQAEAFLSVHELLPMMFYYLLLKKEEPNNDKKNASIVEGFIKREIRDMYKLYDAFANGEINNIGDLEKYCEDKGIPKRHLPKQMVAILYDEPKDMVKEAKRKQKEMVKDTKKLLATLEKQTQEEIEDGGRNIRLLKSGEIARWLVNDMMRFQPVQKDNEGNPLNNSKANSTEYQMLQRSLALYNKEEKPTRYFRQVNLINSSNPHPFLKWTKWEECNNILSFYRNYLTKKIEFLNKLKPEDWEKNQYFLKLKEPKTNRETLVQGWKNGFNLPRGIFTEPIREWFKRHQNDSKEYEKVEALKRVGLVTKVIPLFFKEEYFKEDAQKEINNCVQPFYSFPYNVGNIHKPDEKDFLPSEERKKLWGDKKDKFKGYKAKVKSKKLTDKEKEEYRSYLEFQSWNKFERELRLVRNQDIVTWLLCTELIDKMKVEGLNVEELQKLRLKDIDTDTAKQEKNNILNRIMPMQLPVTVYEIDDSHNIVKDRPLHTVYIEETKTKLLKQGNFKALVKDRRLNGLFSFVDTSSKAELKDKPISKSVVEYELGEYQNARIETIKDMLLLEKTLIKKYEKLPTDNFSDMLNGWLEGKDESDKARFQNDVKLLVAVRNAFSHNQYPMRNRIAFANINPFSLSSADISEEKKLDIANQLKDKTHKIIKKIIEIEKPIETKE

SEQ ID NO: 108 - protein, 1161 aa, Bacteroidetes bacterium
MENQTQKGKGIYYYYTKNEDKHYFGSFLNLANNNIEQIIEEFRIRLSLKDEKNIKEIINNYFTDKKSYTDWERGINILKEYLPVIDYLDLAITDKEFEKIDLKQKETAKRKYFRTNFSLLIDTIIDLRNFYTHYFHKPISINPDVAKFLDKNLLNVCLDIKKQKMKTDKTKQALKDGLDKELKKLIELKKAELKEKKIKTWNITENVEGAVYNDAFNHMVYKNNAGVTILKDYHKSILPDDKIDSELKLNFSISGLVFLLSMFLSKKEIEQFKSNLEGFKGKVIGENGEYEISKFNNSLKYMATHWIFSYLTFKGLKQRVKNTFDKETLLMQMIDELNKVPHEVYQTLSKEQQNEFLEDINEYVQDNEENKKSMENSIVVHPVIRKRYDDKFNYFAIRFLDEFANFPTLKFFVTAGNFVHDKREKQIQGSMLTSDRMIKEKINVFGKLTEIAKYKSDYFSNENTLETSEWELFPNPSYLLIQNNIPVHIDLIHNTEEAKQCQIAIDRIKCTTNPAKKRNTRKSKEEIIKIIYQKNKNIKYGDPTALLSSNELPALIYELLVNKKSGKELENIIVEKIVNQYKTIAGFEKGQNLSNSLITKKLKKSEPNEDKINAEKIILAINRELEITENKLNIIKNNRAEFRTGAKRKHIFYSKELGQEATWIAYDLKRFMPEASRKEWKGFHHSELQKFLAFYDRNKNDAKALLNMFWNFDNDQLIGNDLNSAFREFHFDKFYEKYLIKRDEILEGFKSFISNFKDEPKLLKKGIKDIYRVFDKRYYIIKSTNAQKEQLLSKPICLPRGIFDNKPTYIEGVKVESNSALFADWYQYTYSDKHEFQSFYDMPRDYKEQFEKFELNNIKSIQNKKNLNKSDKFIYFRYKQDLKIKQIKSQDLFIKLMVDELFNVVFKNNIELNLKKLYQTSDERFKNQLIADVQKNREKGDTSDNKMNENFIWNMTIPLSLCNGQIEEPKVKLKDIGKFRKLETDDKVIQLLEYDKSKVWKKLEIEDELENMPNSYERIRREKLLKGIQEFEHFLLEKEKFDGINHPKHFEQDLNPNFKTYVINGVLRKNSKLNYTEIDKLLDLEHISIKDIETSAKEIHLAYFLIHVRNKFGHNQLPKLEAFELMKKYYKKNNEETYAEYFHKVSSQIVNEFKNSLEKHS

SEQ ID NO: 109 - protein, 1165 aa, Chryseobacterium jejuense
MEKTQTGLGIYYDHTKLQDKYFFGGFFNLAQNNIDNVIKAFIIKFFPERKDKDINIAQFLDICFKDNDADSDFQKKNKFLRIHFPVIGFLTSDNDKAGFKKKFALLLKTISELRNFYTHYYHKSIEFPSELFELLDDIFVKTTSEIKKLKKKDDKTQQLLNKNLSEEYDIRYQQQIERLKELKAQGKRVSLTDETAIRNGVFNAAFNHLIYRDGENVKPSRLYQSSYSEPDPAENGISLSQNSILFLLSMFLERKETEDLKSRVKGFKAKIIKQGEEQISGLKFMATHWVFSYLCFKGIKQKLSTEFHEETLLIQIIDELSKVPDEVYSAFDSKTKEKFLEDINEYMKEGNADLSLEDSKVIHPVIRKRYENKFNYFAIRFLDEYLSSTSLKFQVHVGNYVHDRRVKHINGTGFQTERIVKDRIKVFGRLSNISNLKADYIKEQLELPNDSNGWEIFPNPSYIFIDNNVPIHVLADEATKKGIELFKDKRRKEQPEELQKRKGKISKYNIVSMIYKEAKGKDKLRIDEPLALLSLNEIPALLYQILEKGATPKDIELIIKNKLTERFEKIKNYDPETPAPASQISKRLRNNTTAKGQEALNAEKLSLLIEREIENTETKLSSIEEKRLKAKKEQRRNTPQRSIFSNSDLGRIAAWLADDIKRFMPAEQRKNWKGYQHSQLQQSLAYFEKRPQEAFLLLKEGWDTSDGSSYWNNWVMNSFLENNHFEKFYKNYLMKRVKYFSELAGNIKQHTHNTKFLRKFIKQQMPADLFPKRHYILKDLETEKNKVLSKPLVFSRGLFDNNPTFIKGVKVTENPELFAEWYSYGYKTEHVFQHFYGWERDYNELLDSELQKGNSFAKNSIYYNRESQLDLIKLKQDLKIKKIKIQDLFLKRIAEKLFENVFNYPTTLSLDEFYLTQEERAEKERIALAQSLREEGDNSPNIIKDDFIWSKTIAFRSKQIYEPAIKLKDIGKFNRFVLDDEESKASKLLSYDKNKIWNKEQLERELSIGENSYEVIRREKLFKEIQNLELQILSNWSWDGINHPREFEMEDQKNTRHPNFKMYLVNGILRKNINLYKEDEDFWLESLKENDFKTLPSEVLETKSEMVQLLFLVILIRNQFAHNQLPEIQFYNFIRKNYPEIQNNTVAELYLNLIKLAVQKLKDNS

SEQ ID NO: 110 - protein, 1156 aa, Chryseobacterium carnipullorum
MNTRVTGMGVSYDHTKKEDKHFFGGFLNLAQDNITAVIKAFCIKFDKNPMSSVQFAESCFTDKDSDTDFQNKVRYVRTHLPVIGYLNYGGDRNTFRQKLSTLLKAVDSLRNFYTHYYHSPLALSTELFELLDTVFASVAVEVKQHKMKDDKTRQLLSKSLAEELDIRYKQQLERLKELKEQGKNIDLRDEAGIRNGVLNAAFNHLIYKEGEIAKPTLSYSSFYYGADSAENGITISQSGLLFLLSMFLGKKEIEDLKSRIRGFKAKIVRDGEENISGLKFMATHWIFSYLSFKGMKQRLSTDFHEETLLIQIIDELSKVPDEVYHDFDTATREKFVEDINEYIREGNEDFSLGDSTIIHPVIRKRYENKFNYFAVRFLDEFIKFPSLRFQVHLGNFVHDRRIKDIHGTGFQTERVVKDRIKVFGKLSEISSLKTEYIEKELDLDSDTGWEIFPNPSYVFIDNNIPIYISTNKTFKNGSSEFIKLRRKEKPEEMKMRGEDKKEKRDIASMIGNAGSLNSKTPLAMLSLNEMPALLYEILVKKTTPEEIELIIKEKLDSHFENIKNYDPEKPLPASQISKRLRNNTTDKGKKVINPEKLIHLINKEIDATEAKFALLAKNRKELKEKFRGKPLRQTIFSNMELGREATWLADDIKRFMPDILRKNWKGYQHNQLQQSLAFFNSRPKEAFTILQDGWDFADGSSFWNGWIINSFVKNRSFEYFYEAYFEGRKEYFSSLAENIKQHTSNHRNLRRFIDQQMPKGLFENRHYLLENLETEKNKILSKPLVFPRGLFDTKPTFIKGIKVDEQPELFAEWYQYGYSTEHVFQNFYGWERDYNDLLESELEKDNDFSKNSIHYSRTSQLELIKLKQDLKIKKIKIQDLFLKLIAGHIFENIFKYPASFSLDELYLTQEERLNKEQEALIQSQRKEGDHSDNIIKDNFIGSKTVTYESKQISEPNVKLKDIGKFNRFLLDDKVKTLLSYNEDKVWNKNDLDLELSIGENSYEVIRREKLFKKIQNFELQTLTDWPWNGTDHPEEFGTTDNKGVNHPNFKMYVVNGILRKHTDWFKEGEDNWLENLNETHFKNLSFQELETKSKSIQTAFLIIMIRNQFAHNQLPAVQFFEFIQKKYPEIQGSTTSELYLNFINLAVVELLELLEK

SEQ ID NO: 111 - protein, 1036 aa, Chryseobacterium ureilyticum
METQILGNGISYDHTKTEDKHFFGGFLNTAQNNIDLLIKAYISKFESSPRKLNSVQFPDVCFKKNDSDADFQHKLQFIRKHLPVIQYLKYGGNREVLKEKFRLLLQAVDSLRNFYTHFYHKPIQLPNELLTLLDTIFGEIGNEVRQNKMKDDKTRHLLKKNLSEELDFRYQEQLERLRKLKSEGKKVDLRDTEAIRNGVLNAAFNHLIFKDAEDFKPTVSYSSYYYDSDTAENGISISQSGLLFLLSMFLGRREMEDLKSRVRGFKARIIKHEEQHVSGLKFMATHWVFSEFCFKGIKTRLNADYHEETLLIQLIDELSKVPDELYRSFDVATRERFIEDINEYIRDGKEDKSLIESKIVHPVIRKRYESKFNYFAIRFLDEFVNFPTLRFQVHAGNYVHDRRIKSIEGTGFKTERLVKDRIKVFGKLSTISSLKAEYLAKAVNITDDTGWELLPHPSYVFIDNNIPIHLTVDPSFKNGVKEYQEKRKLQKPEEMKNRQGGDKMHKPAISSKIGKSKDINPESPVALLSMNEIPALLYEILVKKASPEEVEAKIRQKLTAVFERIRDYDPKVPLPASQVSKRLRNNTDTLSYNKEKLVELANKEVEQTERKLALITKNRRECREKVKGKFKRQKVFKNAELGTEATWLANDIKRFMPEEQKKNWKGYQHSQLQQSLAFFESRPGEARSLLQAGWDFSDGSSFWNGWVMNSFARDNTFDGFYESYLNGRMKYFLRLADNIAQQSSTNKLISNFIKQQMPKGLFDRRLYMLEDLATEKNKILSKPLIFPRGIFDDKPTFKKGVQVSEEPEAFADWYSYGYDVKHKFQEFYAWDRDYEELLREELEKDTAFTKNSIHYSRESQIELLAKKQDLKVKKVRIQDLYLKLMAEFLFENVFGHELALPLDQFYLTQEERLKQEQEAIVQSQRPKGDDSPNIVKENFIWSKTIPFKSGRVFEPNVKLKDIGKFRNLLTDEKVDILLSYNNTEIGKQVIENELIIGAGSYEFIRREQLFKEIQQMKRLSLRSVRGMGVPIRLNLK

SEQ ID NO: 112 - protein, 1127 aa, Prevotella buccae
MQKQDKLFVDRKKNAIFAFPKYITIMENQEKPEPIYYELTDKHFWAAFLNLARHNVYTTINHINRRLEIAELKDDGYMMDIKGSWNEQAKKLDKKVRLRDLIMKHFPFLEAAAYEITNSKSPNNKEQREKEQSEALSLNNLKNVLFIFLEKLQVLRNYYSHYKYSEESPKPIFETSLLKNMYKVFDANVRLVKRDYMHHENIDMQRDFTHLNRKKQVGRTKNIIDSPNFHYHFADKEGNMTIAGLLFFVSLFLDKKDAIWMQKKLKGFKDGRNLREQMTNEVFCRSRISLPKLKLENVQTKDWMQLDMLNELVRCPKSLYERLREKDRESFKVPFDIFSDDYDAEEEPFKNTLVRHQDRFPYFVLRYFDLNEIFEQLRFQIDLGTYHFSIYNKRIGDEDEVRHLTHHLYGFARIQDFAQQNQPEVWRKLVKDLDYFEASQEPYIPKTAPHYHLENEKIGIKFCSTHNNLFPSLKTEKTCNGRSKFNLGTQFTAEAFLSVHELLPMMFYYLLLTKDYSRKESADKVEGIIRKEISNIYAIYDAFANGEINSIADLTCRLQKTNILQGHLPKQMISILEGRQKDMEKEAERKIGEMIDDTQRRLDLLCKQTNQKIRIGKRNAGLLKSGKIADWLVNDMMRFQPVQKDQNNIPINNSKANSTEYRMLQRALALFGSENFRLKAYFNQMNLVGNDNPHPFLAETQWEHQTNILSFYRNYLEARKKYLKGLKPQNWKQYQHFLILKVQKTNRNTLVTGWKNSFNLPRGIFTQPIREWFEKHNNSKRIYDQILSFDRVGFVAKAIPLYFAEEYKDNVQPFYDYPFNIGNKLKPQKGQFLDKKERVELWQKNKELFKNYPSEKKKTDLAYLDFLSWKKFERELRLIKNQDIVTWLMFKELFNMATVEGLKIGEIHLRDIDTNTANEESNNILNRIMPMKLPVKTYETDNKGNILKERPLATFYIEETETKVLKQGNFKVLAKDRRLNGLLSFAETTDIDLEKNPITKLSVDHELIKYQTTRISIFEMTLGLEKKLINKYPTLPTDSFRNMLERWLQCKANRPELKNYVNSLIAVRNAFSHNQYPMYDATLFAEVKKFTLFPSVDTKKIELNIAPQLLEIVGKAIKEIEKSENKN

SEQ ID NO: 113 - protein, 1135 aa, Porphyromonas gingivalis
MNTVPASENKGQSRTVEDDPQYFGLYLNLARENLIEVESHVRIKFGKKKLNEESLKQSLLCDHLLSVDRWTKVYGHSRRYLPFLHYFDPDSQIEKDHDSKTGVDPDSAQRLIRELYSLLDFLRNDFSHNRLDGTTFEHLEVSPDISSFITGTYSLACGRAQSRFADFFKPDDFVLAKNRKEQLISVADGKECLTVSGLAFFICLFLDREQASGMLSRIRGFKRTDENWARAVHETFCDLCIRHPHDRLESSNTKEALLLDMLNELNRCPRILYDMLPEEERAQFLPALDENSMNNLSENSLNEESRLLWDGSSDWAEALTKRIRHQDRFPYLMLRFIEEMDLLKGIRFRVDLGEIELDSYSKKVGRNGEYDRTITDHALAFGKLSDFQNEEEVSRMISGEASYPVRFSLFAPRYAIYDNKIGYCHTSDPVYPKSKTGEKRALSNPQSMGFISVHNLRKLLLMELLCEGSFSRMQSDFLRKANRILDETAEGKLQFSALFPEMRHRFIPPQNPKSKDRREKAETTLEKYKQEIKGRKDKLNSQLLSAFDMNQRQLPSRLLDEWMNIRPASHSVKLRTYVKQLNEDCRLRLRKFRKDGDGKARAIPLVGEMATFLSQDIVRMIISEETKKLITSAYYNEMQRSLAQYAGEENRRQFRAIVAELHLLDPSSGHPFLSATMETAHRYTEDFYKCYLEKKREWLAKTFYRPEQDENTKRRISVFFVPDGEARKLLPLLIRRRMKEQNDLQDWIRNKQAHPIDLPSHLFDSKIMELLKVKDGKKKWNEAFKDWWSTKYPDGMQPFYGLRRELNIHGKSVSYIPSDGKKFADCYTHLMEKTVQDKKRELRTAGKPVPPDLAADIKRSFHRAVNEREFMLRLVQEDDRLMLMAINKMMTDREEDILPGLKNIDSILDEENQFSLAVHAKVLEKEGEGGDNSLSLVPATIEIKSKRKDWSKYIRYRYDRRVPGLMSHFPEHKATLDEVKTLLGEYDRCRIKIFDWAFALEGAIMSDRDLKPYLHESSSREGKSGEHSTLVKMLVEKKGCLTPDESQYLILIRNKAAHNQFPCAAEMPLIYRDVSAKVGSIEGSSAKDLPEGSSLVDSLWKKYEMIIRKILPILDPENRFFGKLLNNMSQPINDL

SEQ ID NO: 114 - protein, 1175 aa, Porphyromonas gingivalis
MTEQNEKPYNGTYYTLEDKHFWAAFFNLARHNAYITLAHIDRQLAYSKADITNDEDILFFKGQWKNLDNDLERKARLRSLILKHFSFLEGAAYGKKLFESQSSGNKSSKKKELTKKEKEELQANALSLDNLKSILFDFLQKLKDFRNYYSHYRHPESSELPLFDGNMLQRLYNVFDVSVQRVKRDHEHNDKVDPHRHFNHLVRKGKKDKYGNNDNPFFKHHFVDREEKVTEAGLLFFVSLFLEKRDAIWMQKKIRGFKGGTEAYQQMTNEVFCRSRISLPKLKLESLRTDDWMLLDMLNELVRCPKSLYDRLREEDRARFRVPVDILSDEDDTDGTEEDPFKNTLVRHQDRFPYFALRYFDLKKVFTSLRFHIDLGTYHFAIYKKNIGEQPEDRHLTRNLYGFGRIQDFAEEHRPEEWKRLVRDLDYFETGDKPYITQTTPHYHIEKGKIGLRFVPEGQLLWPSPEVGATRTGRSKYAQDKRFTAEAFLSVHELMPMMFYYFLLREKYSEEASAEKVQGRIKRVIEDVYAVYDAFARDEINTRDELDACLADKGIRRGHLPRQMIAILSQEHKDMEEKVRKKLQEMIADTDHRLDMLDRQTDRKIRIGRKNAGLPKSGVIADWLVRDMMRFQPVAKDTSGKPLNNSKANSTEYRMLQRALALFGGEKERLTPYFRQMNLTGGNNPHPFLHETRWESHTNILSFYRSYLKARKAFLQSIGRSDREENHRFLLLKEPKTDRQTLVAGWKSEFHLPRGIFTEAVRDCLIEMGYDEVGSYKEVGFMAKAVPLYFERACKDRVQPFYDYPFNVGNSLKPKKGRFLSKEKRAEEWESGKERFRDLEAWSHSAARRIEDAFVGIEYASWENKKKIEQLLQDLSLWETFESKLKVKADKINIAKLKKEILEAKEHPYHDFKSWQKFERELRLVKNQDIITWMMCRDLMEENKVEGLDTGTLYLKDIRTDVQEQGSLNVLNHVKPMRLPVVVYRADSRGHVHKEEAPLATVYIEERDTKLLKQGNFKSFVKDRRLNGLFSFVDTGALAMEQYPISKLRVEYELAKYQTARVCAFEQTLELEESLLTRYPHLPDESFREMLESWSDPLLDKWPDLQREVRLLIAVRNAFSHNQYPMYDETIFSSIRKYDPSSLDAIEERMGLNIAHRLSEEVKLAKEMVERIIQA

SEQ ID NO: 115 - protein, 1125 aa, Prevotella pallens; identical to SEQ ID NO: 97

SEQ ID NO: 116 - protein, 1157 aa, Myroides odoratimimus; identical to SEQ ID NO: 98

SEQ ID NO: 117 - protein, 1157 aa, Myroides odoratimimus; identical to SEQ ID NO: 99

SEQ ID NO: 118 - protein, 1127 aa, Prevotella sp.
MQKQDKLFVDRKKNAIFAFPKYITIMENQEKPEPIYYELTDKHFWAAFLNLARHNVYTTINHINRRLEIAELKDDGYMMGIKGSWNEQAKKLDKKVRLRDLIMKHFPFLEAAAYEITNSKSPNNKEQREKEQSEALSLNNLKNVLFIFLEKLQVLRNYYSHYKYSEESPKPIFETSLLKNMYKVFDANVRLVKRDYMHHENIDMQRDFTHLNRKKQVGRTKNIIDSPNFHYHFADKEGNMTIAGLLFFVSLFLDKKDAIWMQKKLKGFKDGRNLREQMTNEVFCRSRISLPKLKLENVQTKDWMQLDMLNELVRCPKSLYERLREKDRESFKVPFDIFSDDYDAEEEPFKNTLVRHQDRFPYFVLRYFDLNEIFEQLRFQIDLGTYHFSIYNKRIGDEDEVRHLTHHLYGFARIQDFAPQNQPEEWRKLVKDLDHFETSQEPYISKTAPHYHLENEKIGIKFCSTHNNLFPSLKREKTCNGRSKFNLGTQFTAEAFLSVHELLPMMFYYLLLTKDYSRKESADKVEGIIRKEISNIYAIYDAFANNEINSIADLTCRLQKTNILQGHLPKQMISILEGRQKDMEKEAERKIGEMIDDTQRRLDLLCKQTNQKIRIGKRNAGLLKSGKIADWLVSDMMRFQPVQKDTNNAPINNSKANSTEYRMLQHALALFGSESSRLKAYFRQMNLVGNANPHPFLAETQWEHQTNILSFYRNYLEARKKYLKGLKPQNWKQYQHFLILKVQKTNRNTLVTGWKNSFNLPRGIFTQPIREWFEKHNNSKRIYDQILSFDRVGFVAKAIPLYFAEEYKDNVQPFYDYPFNIGNKLKPQKGQFLDKKERVELWQKNKELFKNYPSEKNKTDLAYLDFLSWKKFERELRLIKNQDIVTWLMFKELFKTTTVEGLKIGEIHLRDIDTNTANEESNNILNRIMPMKLPVKTYETDNKGNILKERPLATFYIEETETKVLKQGNFKVLAKDRRLNGLLSFAETTDIDLEKNPITKLSVDYELIKYQTTRISIFEMTLGLEKKLIDKYSTLPTDSFRNMLERWLQCKANRPELKNYVNSLIAVRNAFSHNQYPMYDATLFAEVKKFTLFPSVDTKKIELNIAPQLLEIVGKAIKEIEKSENKN

SEQ ID NO: 119 - protein, 1119 aa, Porphyromonas gingivalis
MTEQNERPYNGTYYTLEDKHFWAAFFNLARHNAYITLAHIDRQLAYSKADITNDEDILFFKGQWKNLDNDLERKARLRSLILKHFSFLEGAAYGKKLFESQSSGNKSSKKKELTKKEKEELQANALSLDNLKSILFDFLQKLKDFRNYYSHYRHPESSELPLFDGNMLQRLYNVFDVSVQRVKRDHEHNDKVDPHRHFNHLVRKGKKDRYGNNDNPFFKHHFVDREEKVTEAGLLFFVSLFLEKRDAIWMQKKIRGFKGGTETYQQMTNEVFCRSRISLPKLKLESLRTDDWMLLDMLNELVRCPKSLYDRLREEDRARFRVPVDILSDEDDTDGTEEDPFKNTLVRHQDRFPYFALRYFDLKKVFTSLRFHIDLGTYHFAIYKKNIGEQPEDRHLTRNLYGFGRIQDFAEEHRPEEWKRLVRDLDYFETGDKPYITQTTPHYHIEKGKIGLRFVPEGQHLWPSPEVGATRTGRSKYAQDKRLTAEAFLSVHELMPMMFYYFLLREKYSDEASAERVQGRIKRVIEDVYAVYDAFARGEINTRDELDACLADKGIRRGHLPRQMIGILSQEHKDMEEKVRKKLQEMIVDTDHRLDMLDRQTDRKIRIGRKNAGLPKSGVIADWLVRDMMRFQPVAKDTSGKPLNNSKANSTEYRMLQRALALFGGEKERLTPYFRQMNLTGGNNPHPFLHETRWESHTNILSFYRSYLKARKAFLQSIGRSDRVENHRFLLLKEPKTDRQTLVAGWKGEFHLPRGIFTEAVRDCLIEMGLDEVGSYKEVGFMAKAVPLYFERACKDRVQPFYDYPFNVGNSLKPKKGRFLSKEKRAEEWESGKERFRLAKLKKEILEAKEHPYLDFKSWQKFERELRLVKNQDIITWMICRDLMEENKVEGLDTGTLYLKDIRTDVQEQGNLNVLNRVKPMRLPVVVYRADSRGHVHKEQAPLATVYIEERDTKLLKQGNFKSFVKDRRLNGLFSFVDTGALAMEQYPISKLRVEYELAKYQTARVCAFEQTLELEESLLTRYPHLPDKNFRKMLESWSDPLLDKWPDLHGNVRLLIAVRNAFSHNQYPMYDEAVFSSIRKYDPSSPDAIEERMGLNIAHRLSEEVKQAKEMAERIIQA

SEQ ID NO: 120 - protein, 1154 aa, Paludibacter propionicigenes
MKTSANNIYFNGINSFKKIFDSKGAIAPIAEKSCRNFDIKAQNDVNKEQRIHYFAVGHTFKQLDTENLFEYVLDENLRAKRPTRFISLQQFDKEFIENIKRLISDIRNINSHYIHRFDPLKIDAVPTNIIDFLKESFELAVIQIYLKEKGINYLQFSENPHADQKLVAFLHDKFLPLDEKKTSMLQNETPQLKEYKEYRKYFKTLSKQAAIDQLLFAEKETDYIWNLFDSHPVLTISAGKYLSFYSCLFLLSMFLYKSEANQLISKIKGFKKNTTEEEKSKREIFTFFSKRFNSMDIDSEENQLVKFRDLILYLNHYPVAWNKDLELDSSNPAMTDKLKSKIIELEINRSFPLYEGNERFATFAKYQIWGKKHLGKSIEKEYINASFTDEEITAYTYETDTCPELKDAHKKLADLKAAKGLFGKRKEKNESDIKKTETSIRELQHEPNPIKDKLIQRIEKNLLTVSYGRNQDRFMDFSARFLAEINYFGQDASFKMYHFYATDEQNSELEKYELPKDKKKYDSLKFHQGKLVHFISYKEHLKRYESWDDAFVIENNAIQLKLSFDGVENTVTIQRALLIYLLEDALRNIQNNTAENAGKQLLQEYYSHNKADLSAFKQILTQQDSIEPQQKTEFKKLLPRRLLNNYSPAINHLQTPHSSLPLILEKALLAEKRYCSLVVKAKAEGNYDDFIKRNKGKQFKLQFIRKAWNLMYFRNSYLQNVQAAGHHKSFHIERDEFNDFSRYMFAFEELSQYKYYLNEMFEKKGFFENNEFKILFQSGTSLENLYEKTKQKFEIWLASNTAKTNKPDNYHLNNYEQQFSNQLFFINLSHFINYLKSTGKLQTDANGQIIYEALNNVQYLIPEYYYTDKPERSESKSGNKLYNKLKATKLEDALLYEMAMCYLKADKQIADKAKHPITKLLTSDVEFNITNKEGIQLYHLLVPFKKIDAFIGLKMHKEQQDKKHPTSFLANIVNYLELVKNDKDIRKTYEAFSTNPVKRTLTYDDLAKIDGHLISKSIKFTNVTLELERYFIFKESLIVKKGNNIDFKYIKGLRNYYNNEKKKNEGIRNKAFHFGIPDSKSYDQLIRDAEVMFIANEVKPTHATKYTDLNKQLHTVCDKLMETVHNDYFSKEGDGKKKREAAGQKYFENIISAK

SEQ ID NO: 121 - protein, 1119 aa, Porphyromonas gingivalis
MTEQNEKPYNGTYYTLEDKHFWAAFFNLARHNAYITLAHIDRQLAYSKADITNDEDILFFKGQWKNLDNDLERKARLRSLILKHFSFLEGAAYGKKLFESQSSGNKSSKNKELTKKEKEELQANALSLDNLKSILFDFLQKLKDFRNYYSHYRHPESSELPLFDGNMLQRLYNVFDVSVQRVKRDHEHNDKVDPHRHFNHLVRKGKKDRYGNNDNPFFKHHFVDREGTVTEAGLLFFVSLFLEKRDAIWMQKKIRGFKGGTETYQQMTNEVFCRSRISLPKLKLESLRTDDWMLLDMLNELVRCPKSLYDRLREEDRARFRVPVDILSDEEDTDGAEEDPFKNTLVRHQDRFPYFALRYFDLKKVFTSLRFQIDLGTYHFAIYKKNIGEQPEDRHLTRNLYGFGRIQDFAEEHRPEEWKRLVRDLDYFETGDKPYITQTTPHYHIEKGKIGLRFVPEGQHLWPSPEVGATRTGRSKYAQDKRFTAEAFLSAHELMPMMFYYFLLREKYSEEASAERVQGRIKRVIEDVYAVYDAFARDEINTRDELDACLADKGIRRGHLPRQMIGILSQEHKDMEEKIRKKLQEMMADTDHRLDMLDRQTDRKIRIGRKNAGLPKSGVIADWLVRDMMRFQPVAKDTSGKPLNNSKANSTEYRMLQRALALFGGEKERLTPYFRQMNLTGGNNPHPFLHETRWESHTNILSFYRSYLKARKAFLQSIGRSDRVENHRFLLLKEPKTDRQTLVAGWKGEFHLPRGIFTEAVRDCLIEMGLDEVGSYKEVGFMAKAVPLYFERACKDWVQPFYNYPFNVGNSLKPKKGRFLSKEKRAEEWESGKERFRLAKLKKEILEAKEHPYLDFKSWQKFERELRLVKNQDIITWMICGDLMEENKVEGLDTGTLYLKDIRTDVQEQGSLNVLNRVKPMRLPVVVYRADSRGHVHKEQAPLATVYIEERDTKLLKQGNFKSFVKDRRLNGLFSFVDTGALAMEQYPISKLRVEYELAKYQTARVCAFEQTLELEESLLTRCPHLPDKNFRKMLESWSDPLLDKWPDLHRKVRLLIAVRNAFSHNQYPMYDEAVFSSIRKYDPSFPDAIEERMGLNIAHRLSEEVKQAKETVERIIQA

SEQ ID NO: 122 - protein, 1179 aa, Flavobacterium columnare
MSSKNESYNKQKTFNHYKQEDKYFFGGFLNNADDNLRQVGKEFKTRINFNHNNNELASVFKDYFNKEKSVAKREHALNLLSNYFPVLERIQKHTNHNFEQTREIFELLLDTIKKLRDYYTHHYHKPITINPKIYDFLDDTLLDVLITIKKKKVKNDTSRELLKEKLRPELTQLKNQKREELIKKGKKLLEENLENAVFNHCLRPFLEENKTDDKQNKTVSLRKYRKSKPNEETSITLTQSGLVFLMSFFLHRKEFQVFTSGLEGFKAKVNTIKEEEISLNKNNIVYMITHWSYSYYNFKGLKHRIKTDQGVSTLEQNNTTHSLTNTNTKEALLTQIVDYLSKVPNEIYETLSEKQQKEFEEDINEYMRENPENEDSTFSSIVSHKVIRKRYENKFNYFAMRFLDEYAELPTLRFMVNFGDYIKDRQKKILESIQFDSERIIKKEIHLFEKLSLVTEYKKNVYLKETSNIDLSRFPLFPNPSYVMANNNIPFYIDSRSNNLDEYLNQKKKAQSQNKKRNLTFEKYNKEQSKDAIIAMLQKEIGVKDLQQRSTIGLLSCNELPSMLYEVIVKDIKGAELENKIAQKIREQYQSIRDFTLDSPQKDNIPTTLIKTINTDSSVTFENQPIDIPRLKNAIQKELTLTQEKLLNVKEHEIEVDNYNRNKNTYKFKNQPKNKVDDKKLQRKYVFYRNEIRQEANWLASDLIHFMKNKSLWKGYMHNELQSFLAFFEDKKNDCIALLETVFNLKEDCILTKGLKNLFLKHGNFIDFYKEYLKLKEDFLNTESTFLENGLIGLPPKILKKELSKRFKYIFIVFQKRQFIIKELEEKKNNLYADAINLSRGIFDEKPTMIPFKKPNPDEFASWFVASYQYNNYQSFYELTPDIVERDKKKKYKNLRAINKVKIQDYYLKLMVDTLYQDLFNQPLDKSLSDFYVSKAEREKIKADAKAYQKRNDSSLWNKVIHLSLQNNRITANPKLKDIGKYKRALQDEKIATLLTYDDRTWTYALQKPEKENENDYKELHYTALNMELQEYEKVRSKELLKQVQELEKQILEEYTDFLSTQIHPADFEREGNPNFKKYLAHSILENEDDLDKLPEKVEAMRELDETITNPIIKKAIVLIIIRNKMAHNQYPPKFIYDLANRFVPKKEEEYFATYFNRVFETITKELWENKEKKDKTQV

SEQ ID NO: 123 - protein, 1145 aa, Psychroflexus torquis
MESIIGLGLSFNPYKTADKHYFGSFLNLVENNLNAVFAEFKERISYKAKDENISSLIEKHFIDNMSIVDYEKKISILNGYLPIIDFLDDELENNLNTRVKNFKKNFIILAEAIEKLRDYYTHFYHDPITFEDNKEPLLELLDEVLLKTILDVKKKYLKTDKTKEILKDSLREEMDLLVIRKTDELREKKKTNPKIQHTDSSQIKNSIFNDAFQGLLYEDKGNNKKTQVSHRAKTRLNPKDIHKQEERDFEIPLSTSGLVFLMSLFLSKKEIEDFKSNIKGFKGKVVKDENHNSLKYMATHRVYSILAFKGLKYRIKTDTFSKETLMMQMIDELSKVPDCVYQNLSETKQKDFIEDWNEYFKDNEENTENLENSRVVHPVIRKRYEDKFNYFAIRFLDEFANFKTLKFQVFMGYYIHDQRTKTIGTTNITTERTVKEKINVFGKLSKMDNLKKHFFSQLSDDENTDWEFFPNPSYNFLTQADNSPANNIPIYLELKNQQIIKEKDAIKAEVNQTQNRNPNKPSKRDLLNKILKTYEDFHQGDPTAILSLNEIPALLHLFLVKPNNKTGQQIENIIRIKIEKQFKAINHPSKNNKGIPKSLFADTNVRVNAIKLKKDLEAELDMLNKKHIAFKENQKASSNYDKLLKEHQFTPKNKRPELRKYVFYKSEKGEEATWLANDIKRFMPKDFKTKWKGCQHSELQRKLAFYDRHTKQDIKELLSGCEFDHSLLDINAYFQKDNFEDFFSKYLENRIETLEGVLKKLHDFKNEPTPLKGVFKNCFKFLKRQNYVTESPEIIKKRILAKPTFLPRGVFDERPTMKKGKNPLKDKNEFAEWFVEYLENKDYQKFYNAEEYRMRDADFKKNAVIKKQKLKDFYTLQMVNYLLKEVFGKDEMNLQLSELFQTRQERLKLQGIAKKQMNKETGDSSENTRNQTYIWNKDVPVSFFNGKVTIDKVKLKNIGKYKRYERDERVKTFIGYEVDEKWMMYLPHNWKDRYSVKPINVIDLQIQEYEEIRSHELLKEIQNLEQYIYDHTTDKNILLQDGNPNFKMYVLNGLLIGIKQVNIPDFIVLKQNTNFDKIDFTGIASCSELEKKTIILIAIRNKFAHNQLPNKMIYDLANEFLKIEKNETYANYYLKVLKKMISDLA

SEQ ID NO: 124 - protein, 948 aa, Riemerella anatipestifer
MFFSFHNAQRVIFKHLYKAFDASLRMVKEDYKAHFTVNLTRDFAHLNRKGKNKQDNPDFNRYRFEKDGFFTESGLLFFTNLFLDKRDAYWMLKKVSGFKASHKQREKMTTEVFCRSRILLPKLRLESRYDHNQMLLDMLSELSRCPKLLYEKLSEENKKHFQVEADGFLDEIEEEQNPFKDTLIRHQDRFPYFALRYLDLNESFKSIRFQVDLGTYHYCIYDKKIGDEQEKRHLTRTLLSFGRLQDFTEINRPQEWKALTKDLDYKETSNQPFISKTTPHYHITDNKIGFRLGTSKELYPSLEIKDGANRIAKYPYNSGFVAHAFISVHELLPLMFYQHLTGKSEDLLKETVRHIQRIYKDFEEERINTIEDLEKANQGRLPLGAFPKQMLGLLQNKQPDLSEKAKIKIEKLIAETKLLSHRLNTKLKSSPKLGKRREKLIKTGVLADWLVKDFMRFQPVAYDAQNQPIKSSKANSTEFWFIRRALALYGGEKNRLEGYFKQTNLIGNTNPHPFLNKFNWKACRNLVDFYQQYLEQREKFLEAIKHQPWEPYQYCLLLKVPKENRKNLVKGWEQGGISLPRGLFTEAIRETLSKDLTLSKPIRKEIKKHGRVGFISRAITLYFKEKYQDKHQSFYNLSYKLEAKAPLLKKEEHYEYWQQNKPQSPTESQRLELHTSDRWKDYLLYKRWQHLEKKLRLYRNQDIMLWLMTLELTKNHFKELNLNYHQLKLENLAVNVQEADAKLNPLNQTLPMVLPVKVYPTTAFGEVQYHETPIRTVYIREEQTKALKMGNFKALVKDRRLNGLFSFIKEENDTQKHPISQLRLRRELEIYQSLRVDAFKETLSLEEKLLNKHASLSSLENEFRTLLEEWKKKYAASSMVTDKHIAFIASVRNAFCHNQYPFYKETLHAPILLFTVAQPTTEEKDGLGIAEALLKVLREYCEIVKSQI

SEQ ID NO: 125 - protein, 1139 aa, Prevotella pleuritidis
MENDKRLEESACYTLNDKHFWAAFLNLARHNVYITVNHINKTLELKNKKNQEIIIDNDQDILAIKTHWAKVNGDLNKTDRLRELMIKHFPFLEAAIYSNNKEDKEEVKEEKQAKAQSFKSLKDCLFLFLEKLQEARNYYSHYKYSESSKEPEFEEGLLEKMYNTFDASIRLVKEDYQYNKDIDPEKDFKHLERKEDFNYLFTDKDNKGKITKNGLLFFVSLFLEKKDAIWMQQKFRGFKDNRGNKEKMTHEVFCRSRMLLPKIRLESTQTQDWILLDMLNELIRCPKSLYERLQGAYREKFKVPFDSIDEDYDAEQEPFRNTLVRHQDRFPYFALRYFDYNEIFKNLRFQIDLGTYHFSIYKKLIGGKKEDRHLTHKLYGFERIQEFTKQNRPDKWQAIIKDLDTYETSNERYISETTPHYHLENQKIGIRFRNDNNDIWPSLKTNGEKNEKSKYNLDKPYQAEAFLSVHELLPMMFYYLLLKMENTDNDKEDNEVGTKKKGNKNNKQEKHKIEEIIENKIKDIYALYDAFTNGEINSIDELAEQREGKDIEIGHLPKQLIVILKNKSKDMAEKANRKQKEMIKDTKKRLATLDKQVKGEIEDGGRNIRLLKSGEIARWLVNDMMRFQPVQKDNEGKPLNNSKANSTEYQMLQRSLALYNKEEKPTRYFRQVNLIKSSNPHPFLEDTKWEECYNILSFYRNYLKAKIKFLNKLKPEDWKKNQYFLMLKEPKTNRKTLVQGWKNGFNLPRGIFTEPIKEWFKRHQNDSEEYKKVEALDRVGLVAKVIPLFFKEEYFKEDAQKEINNCVQPFYSFPYNVGNIHKPEEKNFLHCEERRKLWDKKKDKFKGYKAKEKSKKMTDKEKEEHRSYLEFQSWNKFERELRLVRNQDILTWLLCTKLIDKLKIDELNIEELQKLRLKDIDTDTAKKEKNNILNRVMPMRLPVTVYEIDKSFNIVKDKPLHTVYIEETGTKLLKQGNFKALVKDRRLNGLFSFVKTSSEAESKSKPISKLRVEYELGAYQKARIDIIKDMLALEKTLIDNDENLPTNKFSDMLKSWLKGKGEANKARLQNDVGLLVAVRNAFSHNQYPMYNSEVFKGMKLLSLSSDIPEKEGLGIAKQLKDKIKETIERIIEIEKEIRN

SEQ ID NO: 126 - protein, 1135 aa, Porphyromonas gingivalis; identical to SEQ ID NO: 104

SEQ ID NO: 127 - protein, 1135 aa, Porphyromonas gingivalis
MNTVPASENKGQSRTVEDDPQYFGLYLNLARENLIEVESHVRIKFGKKKLNEESLKQSLLCDHLLSVDRWTKVYGHSRRYLPFLHYFDPDSQIEKDHDSKTGVDPDSAQRLIRELYSLLDFLRNDFSHNRLDGTTFEHLEVSPDISSFITGTYSLACGRAQSRFADFFKPDDFVLAKNRKEQLISVADGKECLTVSGLAFFICLFLDREQASGMLSRIRGFKRTNENWARAVHETFCDLCIRHPHDRLESSNTKEALLLDMLNELNRCPRILYDMLPEEERAQFLPALDENSMNNLSENSLNEESRLLWDGSSDWAEALTKRIRHQDRFPYLMLRFIEEMDLLKGIRFRVDLGEIELDSYSKKVGRNGEYDRTITDHALAFGKLSDFQNEEEVSRMISGEASYPVRFSLFAPRYAIYDNKIGYCHTSDPVYPKSKTGEKRALSNPQSMGFISVHDLRKLLLMELLCEGSFSRMQSGFLRKANRILDETAEGKLQFSALFPEMRHRFIPPQNPKSKDRREKAETTLEKYKQEIKGRKDKLNSQLLSAFDMNQRQLPSRLLDEWMNIRPASHSVKLRTYVKQLNEDCRLRLRKFRKDGDGKARAIPLVGEMATFLSQDIVRMIISEETKKLITSAYYNEMQRSLAQYAGEENRRQFRAIVAELHLLDPSSGHPFLSATMETAHRYTEDFYKCYLEKKREWLAKTFYRPEQDENTKRRISVFFVPDGEARKLLPLLIRRRMKEQNDLQDWIRNKQAHPIDLPSHLFDSKIMELLKVKDGKKKWNEAFKDWWSTKYPDGMQPFYGLRRELNIHGKSVSYIPSDGKKFADCYTHLMEKTVQDKKRELRTAGKPVPPDLAADIKRSFHRAVNEREFMLRLVQEDDRLMLMAINKMMTDREEDILPGLKNIDSILDKENQFSLAVHAKVLEKEGEGGDNSLSLVPATIEIKSKRKDWSKYIRYRYDRRVPGLMSHFPEHKATLDEVKTLLGEYDRCRIKIFDWAFALEGAIMSDRDLKPYLHESSSREGKSGEHSTLVKMLVEKKGCLTPDESQYLILIRNKAAHNQFPCAAEMPLIYRDVSAKVGSIEGSSAKDLPEGSSLVDSLWKKYEMIIRKILPILDHENRFFGKLLNNMSQPINDL

SEQ ID NO: 128 - protein, 1135 aa, Porphyromonas gingivalis; identical to SEQ ID NO: 105

SEQ ID NO: 129 - protein, 1135 aa, Porphyromonas gingivalis; identical to SEQ ID NO: 106

SEQ ID NO: 130 - protein, 1135 aa, Porphyromonas gingivalis
MNTVPASENKGQSRTVEDDPQYFGLYLNLARENLIEVESHVRIKFGKKKLNEESLKQSLLCDHLLSVDRWTKVYGHSRRYLPFLHYFDPDSQIEKDHDSKTGVDPDSAQRLIRELYSLLDFLRNDFSHNRLDGTTFEHLEVSPDISSFITGTYSLACGRAQSRFADFFKPDDFVLAKNRKEQLISVADGKECLTVSGLAFFICLFLDREQASGMLSRIRGFKRTDENWARAVHETFCDLCIRHPHDRLESSNTKEALLLDMLNELNRCPRILYDMLPEEERAQFLPALDENSMNNLSENSLNEESRLLWDGSSDWAEALTKRIRHQDRFPYLMLRFIEEMDLLKGIRFRVDLGEIELDSYSKKVGRNGEYDRTITDHALAFGKLSDFQNEEEVSRMISGEASYPVRFSLFAPRYAIYDNKIGYCHTSDPVYPKSKTGEKRALSNPRSMGFISVHDLRKLLLMELLCEGSFSRMQSDFLRKANRILDETAEGKLQFSALFPEMRHRFIPPQNPKSKDRREKAETTLEKYKQEIKGRKDKLNSQLLSAFDMNQRQLPSRLLDEWMNIRPASHSVKLRTYVKQLNEDCRLRLRKFRKDGDGKARAIPLVGEMATFLSQDIVRMIISEETKKLITSAYYNEMQRSLAQYAGEENRRQFRAIVAELHLLDPSSGHPFLSATMETAHRYTEDFYKCYLEKKREWLAKTFYRPEQDENTKRRISVFFVPDGEARKLLPLLIRRRMKEQNDLQDWIRNKQAHPIDLPSHLFDSKIMELLKVKDGKKKWNEAFKDWWSTKYPDGMQPFYGLRRELNIHGKSVSYIPSDGKKFADCYTHLMEKTVQDKKRELRTAGKPVPPDLAADIKRSFHRAVNEREFMLRLVQEDDRLMLMAINKMMTDREEDILPGLKNIDSILDEENQFSLAVHAKVLEKEGEGGDNSLSLVPATIEIKSKRKDWSKYIRYRYDRRVPGLMSHFPEHKATLDEVKTLLGEYDRCRIKIFDWAFALEGAIMSDRDLKPYLHESSSREGKSGEHSTLVKMLVEKKGCLTPDESQYLILIRNKAAHNQFPCAAEMPLIYRDVSAKVGSIEGSSAKDLPEGSSLVDSLWKKYEMIIRKILPILDPENRFFGKLLNNMSQPINDL

SEQ ID NO: 131 - protein, 1133 aa, Prevotella falsenii
MKNDNNSTKSTDYTLGDKHFWAAFLNLARHNVYITVNHINKVLELKNKKDQEIIIDNDQDILAIKTLWGKVDTDINKKDRLRELIMKHFPFLEAATYQQSSTNNTKQKEEEQAKAQSFESLKDCLFLFLEKLREARNYYSHYKHSKSLEEPKLEEKLLENMYNIFDTNVQLVIKDYEHNKDINPEEDFKHLGRAEGEFNYYFTRNKKGNITESGLLFFVSLFLEKKDAIWAQTKIKGFKDNRENKQKMTHEVFCRSRMLLPKLRLESTQTQDWILLDMLNELIRCPKSLYKRLQGEKREKFRVPFDPADEDYDAEQEPFKNTLVRHQDRFPYFALRYFDYNEIFTNLRFQIDLGTYHFSIYKKQIGDKKEDRHLTHKLYGFERIQEFAKENRPDEWKALVKDLDTFEESNEPYISETTPHYHLENQKIGIRNKNKKKKKTIWPSLETKTTVNERSKYNLGKSFKAEAFLSVHELLPMMFYYLLLNKEEPNNGKINASKVEGIIEKKIRDIYKLYGAFANEEINNEEELKEYCEGKDIAIRHLPKQMIAILKNEYKDMAKKAEDKQKKMIKDTKKRLAALDKQVKGEVEDGGRNIKPLKSGRIASWLVNDMMRFQPVQRDRDGYPLNNSKANSTEYQLLQRTLALFGSERERLAPYFRQMNLIGKDNPHPFLKDTKWKEHNNILSFYRSYLEAKKNFLGSLKPEDWKKNQYFLKLKEPKTNRETLVQGWKNGFNLPRGIFTEPIREWFIRHQNESEEYKKVKDFDRIGLVAKVIPLFFKEDYQKEIEDYVQPFYGYPFNVGNIHNSQEGTFLNKKEREELWKGNKTKFKDYKTKEKNKEKTNKDKFKKKTDEEKEEFRSYLDFQSWKKFERELRLVRNQDIVTWLLCMELIDKLKIDELNIEELQKLRLKDIDTDTAKKEKNNILNRIMPMELPVTVYETDDSNNIIKDKPLHTIYIKEAETKLLKQGNFKALVKDRRLNGLFSFVETSSEAELKSKPISKSLVEYELGEYQRARVEIIKDMLRLEETLIGNDEKLPTNKFRQMLDKWLEHKKETDDTDLKNDVKLLTEVRNAFSHNQYPMRDRIAFANIKPFSLSSANTSNEEGLGIAKKLKDKTKETIDRIIEIEEQTATKR

SEQ ID NO: 132 - protein, 1116 aa, Prevotella pleuritidis
MENDKRLEESTCYTLNDKHFWAAFLNLARHNVYITINHINKLLEIRQIDNDEKVLDIKALWQKVDKDINQKARLRELMIKHFPFLEAAIYSNNKEDKEEVKEEKQAKAQSFKSLKDCLFLFLEKLQEARNYYSHYKSSESSKEPEFEEGLLEKMYNTFGVSIRLVKEDYQYNKDIDPEKDFKHLERKEDFNYLFTDKDNKGKITKNGLLFFVSLFLEKKDAIWMQQKLRGFKDNRGNKEKMTHEVFCRSRMLLPKIRLESTQTQDWILLDMLNELIRCPKSLYERLQGAYREKFKVPFDSIDEDYDAEQEPFRNTLVRHQDRFPYFALRYFDYNEIFKNLRFQIDLGTYHFSIYKKLIGDNKEDRHLTHKLYGFERIQEFAKQKRPNEWQALVKDLDIYETSNEQYISETTPHYHLENQKIGIRFKNKKDKIWPSLETNGKENEKSKYNLDKSFQAEAFLSIHELLPMMFYDLLLKKEEPNNDEKNASIVEGFIKKEIKRMYAIYDAFANEEINSKEGLEEYCKNKGFQERHLPKQMIAILTNKSKNMAEKAKRKQKEMIKDTKKRLATLDKQVKGEIEDGGRNIRLLKSGEIARWLVNDMMRFQSVQKDKEGKPLNNSKANSTEYQMLQRSLALYNKEQKPTPYFIQVNLIKSSNPHPFLEETKWEECNNILSFYRSYLEAKKNFLESLKPEDWKKNQYFLMLKEPKTNRKTLVQGWKNGFNLPRGIFTEPIKEWFKRHQNDSEEYKKVEALDRVGLVAKVIPLFFKEEYFKEDAQKEINNCVQPFYSFPYNVGNIHKPEEKNFLHCEERRKLWDKKKDKFKGYKAKEKSKKMTDKEKEEHRSYLEFQSWNKFERELRLVRNQDIVTWLLCTELIDKLKIDELNIEELQKLRLKDIDTDTAKKEKNNILNRIMPMQLPVTVYEIDKSFNIVKDKPLHTIYIEETGTKLLKQGNFKALVKDRRLNGLFSFVKTSSEAESKSKPISKLRVEYELGAYQKARIDIIKDMLALEKTLIDNDENLPTNKFSDMLKSWLKGKGEANKARLQNDVDLLVAIRNAFSHNQYPMYNSEVFKGMKLLSLSSDIPEKEGLGIAKQLKDKIKETIERIIEIEKEIRN

SEQ ID NO: 133 - protein, 1119 aa, Porphyromonas gingivalis
MTEQNERPYNGTYYTLEDKHFWAAFFNLARHNAYITLAHIDRQLAYSKADITNDEDILFFKGQWKNLDNDLERKARLRSLILKHFSFLEGAAYGKKLFESQSSGNKSSKKKELTKKEKEELQANALSLDNLKSILFDFLQKLKDFRNYYSHYRHPESSELPLFDGNMLQRLYNVFDVSVQRVKRDHEHNDKVDPHRHFNHLVRKGKKDRYGNNDNPFFKHHFVDREGTVTEAGLLFFVSLFLEKRDAIWMQKKIRGFKGGTEAYQQMTNEVFCRSRISLPKLKLESLRTDDWMLLDMLNELVRCPKSLYDRLREEDRARFRVPIDILSDEDDTDGTEEDPFKNTLVRHQDRFPYFALRYFDLKKVFTSLRFHIDLGTYHFAIYKKNIGEQPEDRHLTRNLYGFGRIQDFAEEHRPEEWKRLVRDLDYFETGDKPYITQTTPHYHIEKGKIGLRFVPEGQHLWPSPEVGATRTGRSKYAQDKRLTAEAFLSVHELMPMMFYYFLLREKYSEEVSAEKVQGRIKRVIEDVYAVYDAFARGEIDTLDRLDACLADKGIRRGHLPRQMIAILSQEHKDMEEKVRKKLQEMIADTDHRLDMLDRQTDRKIRIGRKNAGLPKSGVIADWLVRDMMRFQPVAKDTSGKPLNNSKANSTEYRMLQRALALFGGEKERLTPYFRQMNLTGGNNPHPFLHETRWESHTNILSFYRSYLKARKAFLQSIGRSDREENHRFLLLKEPKTDRQTLVAGWKSEFHLPRGIFTEAVRDCLIEMGYDEVGSYKEVGFMAKAVPLYFERACKDRVQPFYDYPFNVGNSLKPKKGRFLSKEKRAEEWESGKERFRLAKLKKEILEAKEHPYLDFKSWQKFERELRLVKNQDIITWMMCRDLMEENKVEGLDTGTLYLKDIRTDVHEQGSLNVLNRVKPMRLPVVVYRADSRGHVHKEQAPLATVYIEERDTKLLKQGNFKSFVKDRRLNGLFSFVDTGALAMEQYPISKLRVEYELAKYQTARVCAFEQTLELEESLLTRYPHLPDKNFRKMLESWSDPLLDKWPDLHRKVRLLIAVRNAFSHNQYPMYDEAVFSSIRKYDPSSPDAIEERMGLNIAHRLSEEVKQAKEMAERIIQV

SEQ ID NO: 134 - protein, 1175 aa, Porphyromonas gulae
MTEQSERPYNGTYYTLEDKHFWAAFLNLARHNAYITLTHIDRQLAYSKADITNDQDVLSFKALWKNLDNDLERKSRLRSLILKHFSFLEGAAYGKKLFESKSSGNKSSKNKELTKKEKEELQANALSLDNLKSILFDFLQKLKDFRNYYSHYRHSGSSELPLFDGNMLQRLYNVFDVSVQRVKRDHEHNDKVDPHRHFNHLVRKGKKDRYGHNDNPSFKHHFVDSEGMVTEAGLLFFVSLFLEKRDAIWMQKKIRGFKGGTETYQQMTNEVFCRSRISLPKLKLESLRMDDWMLLDMLNELVRCPKPLYDRLREDDRACFRVPVDILPDEDDTDGGGEDPFKNTLVRHQDRFPYFALRYFDLKKVFTSLRFHIDLGTYHFAIYKKMIGEQPEDRHLTRNLYGFGRIQDFAEEHRPEEWKRLVRDLDYFETGDKPYISQTSPHYHIEKGKIGLRFMPEGQHLWPSPEVGTTRTGRSKYAQDKRLTAEAFLSVHELMPMMFYYFLLREKYSEEVSAEKVQGRIKRVIEDVYAIYDAFARDEINTLKELDACLADKGIRRGHLPKQMIAILSQEHKNMEEKVRKKLQEMIADTDHRLDMLDRQTDRKIRIGRKNAGLPKSGVIADWLVRDMMRFQPVAKDASGKPLNNSKANSTEYRMLQRALALFGGEKERLTPYFRQMNLTGGNNPHPFLHDTRWESHTNILSFYRSYLRARKAFLERIGRSDRMENRPFLLLKEPKTDRQTLVAGWKSEFHLPRGIFTEAVRDCLIEMGYDEVGSYREVGFMAKAVPLYFERACEDRVQPFYDSPFNVGNSLKPKKGRFLSKEERAEEWERGKERFRDLEAWSHSAARRIEDAFAGIEYASPGNKKKIEQLLRDLSLWEAFESKLKVRADKINLAKLKKEILEAQEHPYHDFKSWQKFERELRLVKNQDIITWMMCRDLMEENKVEGLDTGTLYLKDIRTNVQEQGSLNVLNHVKPMRLPVVVYRADSRGHVHKEEAPLATVYIEERDTKLLKQGNFKSFVKDRRLNGLFSFVDTGGLAMEQYPISKLRVEYELAKYQTARVCAFEQTLELEESLLTRYPHLPDKNFRKMLESWSDPLLAKWPELHGKVRLLIAVRNAFSHNQYPMYDEAVFSSIRKYDPSSPDAIEERMGLNIAHRLSEEVKQAKETVERIIQA

SEQ ID NO: 135 - protein, 1119 aa, Porphyromonas gulae
MTEQSERPYNGTYYTLEDKHFWAAFLNLARHNAYITLTHIDRQLAYSKADITNDQDVLSFKALWKNLDNDLERKSRLRSLILKHFSFLEGAAYGKKLFESKSSGNKSSKNKELTKKEKEELQANALSLDNLKSILFDFLQKLKDFRNYYSHYRHSGSSELPLFDGNMLQRLYNVFDVSVQRVKRDHEHNDKVDPHRHFNHLVRKGKKDRYGHNDNPSFKHHFVDGEGMVTEAGLLFFVSLFLEKRDAIWMQKKIRGFKGGTETYQQMTNEVFCRSRISLPKLKLESLRTDDWMLLDMLNELVRCPKPLYDRLREKDRARFRVPVDILPDEDDTDGGGEDPFKNTLVRHQDRFPYFALRYFDLKKVFTSLRFHIDLGTYHFAIYKKVIGEQPEDRHLTRNLYGFGRIQDFAEEHRPEEWKRLVRDLDYFETGDKPYISQTTPHYHIEKGKIGLRFVPEGQHLWPSPEVGTTRTGRSKYAQDKRLTAEAFLSVHELMPMMFYYFLLREKYSEEVSAEKVQGRIKRVIEDVYAIYDAFARDEINTRDELDACLADKGIRRGHLPKQMIGILSQEHKNMEEKVRKKLQEMIADTDHRLDMLDRQTDRKIRIGRKNAGLPKSGVIADWLVRDMMRFQPVAKDTSGKPLNNSKANSTEYRMLQRALALFGGEKERLTPYFRQMNLTGGNNPHPFLDETRWESHTNILSFYRSYLRARKAFLERIGRSDRVENRPFLLLKEPKTDRQTLVAGWKSEFHLPRGIFTEAVRDCLIEMGYDEVGSYKEVGFMAKAVPLYFERACKDRVQPFYDSPFNVGNSLKPKKGRFLSKEKRAEEWESGKERFRLAKLKKEILEAQEHPYHDFKSWQKFERELRLVKNQDIITWMMCRDLMEENKVEGLDTGTLYLKDIRPNVQEQGSLNVLNRVKPMRLPVVVYRADSRGHVHKEEAPLATVYIEERDTKLLKQGNFKSFVKDRRLNGLFSFVDTGGLAMEQYPISKLRVEYELAKYQTARVCVFELTLRLEESLLSRYPHLPDESFREMLESWSDPLLAKWPELHGKVRLLIAVRNAFSHNQYPMYDEAVFSSIRKYDPSSPDAIEERMGLNIAHRLSEEVKQAKETVERIIQA

SEQ ID NO: 136 - protein, 1119 aa, Porphyromonas gulae
MTEQSERPYNGTYYTLEDKHFWAAFLNLARHNAYITLTHIDRQLAYSKADITNDQDVLSFKALWKNFDNDLERKSRLRSLILKHFSFLEGAAYGKKLFESKSSGNKSSKNKELTKKEKEELQANALSLDNLKSILFDFLQKLKDFRNYYSHYRHSGSSELPLFDGNMLQRLYNVFDVSVQRVKRDHEHNDKVDPHYHFNHLVRKGKKDRYGHNDNPSFKHHFVDSEGMVTEAGLLFFVSLFLEKRDAIWMQKKIRGFKGGTGPYEQMTNEVFCRSRISLPKLKLESLRTDDWMLLDMLNELVRCPKPLYDRLREKDRACFRVPVDILPDEDDTDGGGEDPFKNTLVRHQDRFPYFALRYFDLKKVFTSLRFHIDLGTYHFAIYKKMIGEQPEDRHLTRNLYGFGRIQDFAEEHRPEEWKRLVRDLDYFETGDKPYISQTTPHYHIEKGKIGLRFMPEGQHLWPSPEVGTTRTGRSKYAQDKRLTAEAFLSVHELMPMMFYYFLLREKYSEEVSAEKVQGRIKRVIKDVYAIYDAFARDEINTLKELDACSADKGIRRGHLPKQMIGILSQEHKNMEEKVRKKLQEMIADTDHRLDMLDRQTDRKIRIGRKNAGLPKSGVIADWLVRDMMRFQPVAKDTSGKPLNNSKANSTEYRMLQRALALFGGEKERLTPYFRQMNLTGGNNPHPFLDETRWESHTNILSFYRSYLRARKAFLERIGRSDRVENRPFLLLKEPKNDRQTLVAGWKSEFHLPRGIFTEAVRDCLIEMGYDEVGSYKEVGFMAKAVPLYFERACKDRVQPFYDSPFNVGNSLKPKKGRFLSKEKRAEEWESGKERFRLAKLKKEILEAKEHPYHDFKSWQKFERELRLVKNQDIITWMMCRDLMEENKVEGLDTGTLYLKDIRTDVHEQGSLNVLNRVKPMRLPVVVYRADSRGHVHKEQAPLATVYIEERDTKLLKQGNFKSFVKDRRLNGLFSFVDTGGLAMEQYPISKLRVEYELAKYQTARVCAFEQTLELEESLLTRYPHLPDENFREMLESWSDPLLGKWPDLHGKVRLLIAVRNAFSHNQYPMYDEAVFSSIRKYDPSSPDAIEERMGLNIAHRLSEEVKQAKETVERIIQA

SEQ ID NO: 137 - protein, 1175 aa, Porphyromonas gulae
MTEQSERPYNGTYYTLEDKHFWAAFLNLARHNAYITLTHIDRQLAYSKADITNDQDVLSFKALWKNFDNDLERKSRLRSLILKHFSFLEGAAYGKKLFESKSSGNKSSKNKELTKKEKEELQANALSLDNLKSILFDFLQKLKDFRNYYSHYRHSESSELPLFDGNMLQRLYNVFDVSVQRVKRDHEHNDKVDPHRHFNHLVRKGKKDRYGHNDNPSFKHHFVDGEGMVTEAGLLFFVSLFLEKRDAIWMQKKIRGFKGGTETYQQMTNEVFCRSRISLPKLKLESLRTDDWMLLDMLNELVRCPKPLYDRLREDDRACFRVPVDILPDEDDTDGGGEDPFKNTLVRHQDRFPYFALRYFDLKKVFTSLRFHIDLGTYHFAIYKKMIGEQPEDRHLTRNLYGFGRIQDFAEEHRPEEWKRLVRDLDYFETGDKPYISQTSPHYHIEKGKIGLRFMPEGQHLWPSPEVGTTRTGRSKYAQDKRLTAEAFLSVHELMPMMFYYFLLREKYSEEVSAEKVQGRIKRVIEDVYAIYDAFARDEINTLKELDACLADKGIRRGHLPKQMIAILSQEHKDMEEKIRKKLQEMIADTDHRLDMLDRQTDRKIRIGRKNAGLPKSGVIADWLVRDMMRFQPVAKDTSGKPLNNSKANSTEYRMLQRALALFGGEKKRLTPYFRQMNLTGGNNPHPFLHETRWESHTNILSFYRSYLRARKAFLERIGRSDRMENRPFLLLKEPKTDRQTLVAGWKSEFHLPRGIFTEAVRDCLIEMGYDEVGSYREVGFMAKAVPLYFERACEDRVQPFYDSPFNVGNSLKPKKGRFLSKEERAEEWERGKERFRDLEAWSHSAARRIEDAFAGIEYASPGNKKKIEQLLRDLSLWEAFESKLKVRADKINLAKLKKEILEAQEHPYHDFKSWQKFERELRLVKNQDIITWMMCRDLMEENKVEGLDTGTLYLKDIRPNVQEQGSLNVLNRVKPMRLPVVVYRADSRGHVHKEEAPLATVYIEERDTKLLKQGNFKSFVKDRRLNGLFSFVDTGGLAMEQYPISKLRVEYELAKYQTARVCVFELTLRLEESLLTRYPHLPDESFRKMLESWSDPLLAKWPELHGKVRLLIAVRNAFSHNQYPMYDEAVFSSIRKYDPSSPDAIEERMGLNIAHRLSEEVKQAKETVERIIQV

SEQ ID NO: 138 - protein, 1119 aa, Porphyromonas gulae
MTEQSERPYNGTYYTLEDKHFWAAFLNLARHNAYITLTHIDRQLAYSKADITNDEDILFFKGQWKNLDNDLERKSRLRSLILKHFSFLEGAAYGKKFFESKSSGNKSSKNKELTKKEKEELQANALSLDNLKSILFDFLQKLKDFRNYYSHYRHSGSSELPLFDGNMLQRLYNVFDVSVQRVKRDHEHNDEVDPHYHFNHLVRKGKKDRYGHNDNPSFKHHFVDGEGMVTEAGLLFFVSLFLEKRDAIWMQKKIRGFKGGTEPYEQMTNEVFCRSRISLPKLKLESLRTDDWMLLDMLNELVRCPKPLYDRLREKDRACFRVPVDILPDEDDTDGGGEDPFKNTLVRHQDRFPYFALRYFDLKKVFTSLRFHIDLGTYHFAIYKKMIGEQPEDRHLTRNLYGFGRIQDFAEEHRPEEWKRLVRDLDYFETGDKPYISQTTPHYHIEKGKIGLRFVPEGQHLWPSPEVGTTRTGRSKYAQDKRLTAEAFLSVHELMPMMFYYFLLREKYSEEVSAEKVQGRIKRVIEDVYAIYDAFARDEINTLKELDACLADKGIRRGHLPKQMIGILSQERKDMEEKVRKKLQEMIADTDHRLDMLDRQTDRKIRIGRKNAGLPKSGVIADWLVRDMMRFQPVAKDTSGKPLNNSKANSTEYRMLQRALALFGGEKERLTPYFRQMNLTGGNNPHPFLHETRWESHTNILSFYRSYLRARKAFLERIGRSDRVENCPFLLLKEPKTDRQTLVAGWKGEFHLPRGIFTEAVRDCLIEMGYDEVGSYREVGFMAKAVPLYFERACEDRVQPFYDSPFNVGNSLKPKKGRFLSKEKRAEEWESGKERFRLAKLKKEILEAQEHPYHDFKSWQKFERELRLVKNQDIITWMMCRDLMEENKVEGLDTGTLYLKDIRPNVQEQGSLNVLNRVKPMRLPVVVYRADSRGHVHKEEAPLATVYIEERDTKLLKQGNFKSFVKDRRLNGLFSFVDTGALAMEQYPISKLRVEYELAKYQTARVCAFEQTLELEESLLTRYPHLPDESFREMLESWSDPLLTKWPELHGKVRLLIAVRNAFSHNQYPMYDEAVFSSIWKYDPSSPDAIEERMGLNIAHRLSEEVKQAKETIERIIQA

SEQ ID NO: 139 - protein, 1174 aa, Porphyromonas gulae
MTEQSERPYNGTYYTLEDKHFWAAFLNLARHNAYITLTHIDRQLAYSKADITNDQDVLSFKALWKNLDNDLERKSRLRSLILKHFSFLEGAAYGKKLFESKSSGNKSSKNKELTKKEKEELQANALSLDNLKSILFDFLQKLKDFRNYYSHYRHSGSSELPLFDGNMLQRLYNVFDVSVQRVKRDHEHNDKVDPHYHFNHLVRKGKKDRYGHNDNPSFKHHFVDSEGMVTEAGLLFFVSLFLEKRDAIWMQKKIRGFKGGTGPYEQMTNEVFCRSRISLPKLKLESLRTDDWMLLDMLNELVRCPKPLYDRLREKDRACFRVPVDILPDEDDTDGGGEDPFKNTLVRHQDRFPYFALRYFDLKKVFTSLRFHIDLGTYHFAIYKKMIGEQPEDRHLTRNLYGFGRIQDFAEEHRPEEWKRLVRDLDYLETGDKPYISQTTPHYHIEKGKIGLRFVPEGQHLWPSPEVGTTRTGRSKCAQDKRLTAEAFLSVHELMPMMFYYFLLREKYSEEVSAEKVQGRIKRVIEDVYAIYDAFARDEINTLKELDTCLADKGIRRGHLPKQMITILSQERKDMKEKIRKKLQEMIADTDHRLDMLDRQTDRKIRIGRKNAGLPKSGVIADWLVRDMMRFQPVAKDASGKPLNNSKANSTEYRMLQRALALFGGEKERLTPYFRQMNLTGGNNPHPFLHETRWESHTNILSFYRSYLRARKAFLERIGRSDRVENCPFLLLKEPKTDRQTLVAGWKDEFHLPRGIFTEAVRDCLIEMGYDEVGSYREVGFMAKAVPLYFERACEDRVQPFYDSPFNVGNSLKPKKGRFLSKEDRAEEWERGMERFRDLEAWSHSAARRIKDAFAGIEYASPGNKKKIEQLLRDLSLWEAFESKLKVRADKINLAKLKKEILEAQEHPYHDFKSWQKFERELRLVKNQDIITWMMCRDLMEENKVEGLDTGTLYLKDIRPNVQEQGSLNVLNRVKPMRLPVVVYRADSRGHVHKEAPLATVYIEERNTKLLKQGNFKSFVKDRRLNGLFSFVDTGGLAMEQYPISKLRVEYELAKYQTARVCVFELTLRLEESLLSRYPHLPDESFREMLESWSDPLLAKWPELHGKVRLLIAVRNAFSHNQYPMYDEAVFSSIRKYDPSSPDAIEERMGLNIAHRLSEEVKQAKETVERIIQA

SEQ ID NO: 140 - protein, 1135 aa, Porphyromonas gulae
MNTVPATENKGQSRTVEDDPQYFGLYLNLARENLIEVESHVRIKFGKKKLNEESLKQSLLCDHLLSIDRWTKVYGHSRRYLPFLHCFDPDSGIEKDHDSKTGVDPDSAQRLIRELYSLLDFLRNDFSHNRLDGTTFEHLKVSPDISSFITGAYTFACERAQSRFADFFKPDDFLLAKNRKEQLISVADGKECLTVSGFAFFICLFLDREQASGMLSRIRGFKRTDENWARAVHETFCDLCIRHPHDRLESSNTKEALLLDMLNELNRCPRILYDMLPEEERAQFLPALDENSMNNLSENSLNEESRLLWDGSSDWAEALTKRIRHQDRFPYLMLRFIEEMDLLKGIRFRVDLGEIELDSYSKKVGRNGEYDRTITDHALAFGKLSDFQNEEEVSRMISGEASYPVRFSLFAPRYAIYDNKIGYCHTSDPVYPKSKTGEKRALSNPQSMGFISVHDLRKLLLMELLCEGSFSRMQSDFLRKANRILDETAEGKLQFSALFPEMRHRFIPPQNPKSKDRREKAETTLEKYKQEIKGRKDKLNSQLLSAFDMNQRQLPSRLLDEWMNIRPASHSVKLRTYVKQLNEDCRLRLRKFRKDGDGKARAIPLVGEMATFLSQDIVRMIISEETKKLITSAYYNEMQRSLAQYAGEENRRQFRAIVAELHLLDPSSGHPFLSATMETAHRYTEDFYKCYLEKKREWLAKTFYRPEQDENTKRRISVFFVPDGEARKLLPLLIRRRMKEQNDLQDWIRNKQAHPIDLPSHLFDSKIMELLKVKDGKKKWNEAFKDWWSTKYPDGMQPFYGLRRELNIHGKSVSYIPSDGKKFADCYTHLMEKTVRDKKRELRTAGKPVPPDLAAYIKRSFHRAVNEREFMLRLVQEDDRLMLMAINKMMTDREEDILPGLKNIDSILDEENQFSLAVHAKVLEKEGEGGDNSLSLVPATIEIKSKRKDWSKYIRYRYDRRVPGLMSHFPEHKATLDEVKTLLGEYDRCRIKIFDWAFALEGAIMSDRDLKPYLHESSSREGKSGEHSTLVKMLVEKKGCLTPDESQYLILIRNKAAHNQFPCAAEMPLIYRDVSAKVGSIEGSSAKDLPEGSSLVDSLWKKYEMIIRKILPILDHENRFFGKLLNNMSQPINDL

SEQ ID NO: 141 - protein, 1218 aa, Capnocytophaga cynodegmi
MENKTSLGNNIYYNPFKPQDKSYFAGYLNAAMENIDSVFRELGKRLKGKEYTSENFFDAIFKENISLVEYERYVKLLSDYFPMARLLDKKEVPIKERKENFKKNFRGIIKAVRDLRNFYTHKEHGEVEITDEIFGVLDEMLKSTVLTVKKKKIKTDKTKEILKKSIEKQLDILCQKKLEYLKDTARKIEEKRRNQRERGEKKLVPRFEYSDRRDDLIAAIYNDAFDVYIDKKKDSLKESSKTKYNTESYPQQEEGDLKIPISKNGVVFLLSLFLSKQEVHAFKSKIAGFKATVIDEATVSHRKNSICFMATHEIFSHLAYKKLKRKVRTAEINYSEAENAEQLSIYAKETLMMQMLDELSKVPDVVYQNLSEDVQKTFIEDWNEYLKENNGDVGTMEEEQVIHPVIRKRYEDKFNYFAIRFLDEFAQFPTLRFQVHLGNYLHDSRPKEHLISDRRIKEKITVFGRLSELEHKKALFIKNTETNEDRKHYWEVFPNPNYDFPKENISVNDKDFPIAGSILDREKQPTAGKIGIKVNLLNQKYISEVDKAVKAHQLKQRNNKPSIQNIIEEIVPINGSNPKEIIVFGGQPTAYLSMNDIHSILYEFFDKWEKKKEKLEKKGEKELRKEIGKELEEKIVGKIQTQIQQIIDKDINAKILKPYQDDDSTAIDKEKLIKDLKQEQKILQKLKNEQTAREKEYQECIAYQEESRKIKRSDKSRQKYLRNQLKRKYPEVPTRKEILYYQEKGKVAVWLANDIKRFMPTDFKNEWKGEQHSLLQKSLAYYEQCKEELKNLLPQQKVFKHLPFELGGHFQQKYLYQFYTRYLDKRLEHISGLVQQAENFKNENKVFKKVENECFKFLKKQNYTHKGLDAQAQSVLGYPIFLERGFMDEKPTIIKGKTFKGNESLFTDWFRYYKEYQNFQTFYDTENYPLVELEKKQADRKRETKIYQQKKNDVFTLLMAKHIFKSVFKQDSIDRFSLEDLYQSREERLENQEKAKQTGERNTNYIWNKTVDLNLCDGKVTVENVKLKNVGNFIKYEYDQRVQTFLKYEENIKWQAFLIKESKEEENYPYIVEREIEQYEKVRREELLKEVHLIEEYILEKVKDKEILKKGDNQNFKYYILNGLLKQLKNEDVESYKVFNLNTKPEDVNINQLKQEATDLEQKAFVLTYIRNKFAHNQLPKKEFWDYCQEKYGKIEKEKTYAEYFAEVFKREKEALMK

SEQ ID NO: 142 - protein, 1090 aa, Prevotella sp.
MNIPALVENQKKYFGTYSVMAMLNAQTVLDHIQKVADIEGEQNENNENLWFHPVMSHLYNAKNGYDKQPEKTMFIIERLQSYFPFLKIMAENQREYSNGKYKQNRVEVNSNDIFEVLKRAFGVLKMYRDLTNHYKTYEEKLIDGCEFLTSTEQPLSGMISKYYTVALRNTKERYGYKTEDLAFIQDNIKKITKDAYGKRKSQVNTGFFLSLQDYNGDTQKKLHLSGVGIALLICLFLDKQYINIFLSRLPIFSSYNAQSEERRIIIRSFGINSIKLPKDRIHSEKSNKSVAMDMLNEVKRCPDELFTTLSAEKQSRFRIISDDHNEVLMKRSTDRFVPLLLQYIDYGKLFDHIRFHVNMGKLRYLLKADKTCIDGQTRVRVIEQPLNGFGRLEEAETMRKQENGTFGNSGIRIRDFENVKRDDANPANYPYIVDTYTHYILENNKVEMFISDKGSSAPLLPLIEDDRYVVKTIPSCRMSTLEIPAMAFHMFLFGSKKTEKLIVDVHNRYKRLFQAMQKEEVTAENIASFGIAESDLPQKILDLISGNAHGKDVDAFIRLTVDDMLTDTERRIKRFKDDRKSIRSADNKMGKRGFKQISTGKLADFLAKDIVLFQPSVNDGENKITGLNYRIMQSAIAVYDSGDDYEAKQQFKLMFEKARLIGKGTTEPHPFLYKVFARSIPANAVDFYERYLIERKFYLTGLCNEIKRGNRVDVPFIRRDQNKWKTPAMKTLGRIYSEDLPVELPRQMFDNEIKSHLKSLPQMEGIDFNNANVTYLIAEYMKRVLNDDFQTFYQWKRNYHYMDMLKGEYDRKGSLQHCFTSVEEREGLWKERASRTERYRKLASNKIRSNRQMRNASSEEIETILDKRLSNCRNEYQKSEKVIRRYRVQDALLFLLAKKTLTELADFDGERFKLKEIMPDAEKGILSEIMPMSFTFEKGGKKYTITSEGMKLKNYGDFFVLASDKRIGNLLELVGSDIVSKEDIMEEFNKYDQCRPEISSIVFNLEKWAFDTYPELSARVDREEKVDFKSILKILLNNKNINKEQSDILRKIRNAFDHNNYPDKGIVEIKALPEIAMSIKKAFGEYAIMK

SEQ ID NO: 143 - protein, 1090 aa, Prevotella sp.
MNIPALVENQKKYFGTYSVMAMLNAQTVLDHIQKVADIEGEQNENNENLWFHPVMSHLYNAKNGYDKQPEKTMFIIERLQSYFPFLKIMAENQREYSNGKYKQNRVEVNSNDIFEVLKRAFGVLKMYRDQASHYKTYDEKLIDGCEFLTSTEQPLSGMINNYYTVALRNMNERYGYKTEDLAFIQDKRFKFVKDAYGKKKSQVNTGFFLSLQDYNGDTQKKLHLSGVGIALLICLFLDKQYINIFLSRLPIFSSYNAQSEERRIIIRSFGINSIKQPKDRIHSEKSNKSVAMDMLNEIKRCPNELFETLSAEKQSRFRIISNDHNEVLMKRSSDRFVPLLLQYIDYGKLFDHIRFHVNMGKLRYLLKADKTCIDGQTRVRVIEQPLNGFGRLEEVETMRKQENGTFGNSGIRIRDFENMKRDDANPANYPYIVDTYTHYILENNKVEMFISDEETPAPLLPVIEDDRYVVKTIPSCRMSTLEIPAMAFHMFLFGSKKTEKLIVDVHNRYKRLFKAMQKEEVTAENIASFGIAESDLPQKIIDLISGNAHGKDVDAFIRLTVDDMLADTERRIKRFKDDRKSIRSADNKMGKRGFKQISTGKLADFLAKDIVLFQPSVNDGENKITGLNYRIMQSAIAVYNSGDDYEAKQQFKLMFEKARLIGKGTTEPHPFLYKVFVRSIPANAVDFYERYLIERKFYLIGLSNEIKKGNRVDVPFIRRDQNKWKTPAMKTLGRIYDEDLPVELPRQMFDNEIKSHLKSLPQMEGIDFNNANVTYLIAEYMKRVLNDDFQTFYQWKRNYRYMDMLRGEYDRKGSLQSCFTSVEEREGLWKERASRTERYRKLASNKIRSNRQMRNASSEEIETILDKRLSNSRNEYQKSEKVIRRYRVQDALLFLLAKKTLTELADFDGERFKLKEIMPDAEKGILSEIMPMSFTFEKGGKKYTITSEGMKLKNYGDFFVLASDKRIGNLLELVGSDTVSKEDIMEEFKKYDQCRPEISSIVFNLEKWAFDTYPELSARVDREEKVDFKSILKILLNNKNINKEQSDILRKIRNAFDHNNYPDKGVVEIRALPEIAMSIKKAFGEYAIMK

SEQ ID NO: 144 - protein, 1090 aa, Prevotella sp.
MNIPALVENQKKYFGTYSVMAMLNAQTVLDHIQKVADIEGEQNENNENLWFHPVMSHLYNAKNGYDKQPEKTMFIIERLQSYFPFLKIMAENQREYSNGKYKQNRVEVNSNDIFEVLKRAFGVLKMYRDLTNHYKTYEEKLIDGCEFLTSTEQPFSGMISKYYTVALRNTKERYGYKAEDLAFIQDNRYKFTKDAYGKRKSQVNTGSFLSLQDYNGDTTKKLHLSGVGIALLICLFLDKQYINLFLSRLPIFSSYNAQSEERRIIIRSFGINSIKQPKDRIHSEKSNKSVAMDMLNEVKRCPDELFTTLSAEKQSRFRIISDDHNEVLMKRSSDRFVPLLLQYIDYGKLFDHIRFHVNMGKLRYLLKADKTCIDGQTRVRVIEQPLNGFGRLEEVETMRKQENGTFGNSGIRIRDFENMKRDDANPANYPYIVETYTHYILENNKVEMFISDEENPTPLLPVIEDDRYVVKTIPSCRMSTLEIPAMAFHMFLFGSEKTEKLIIDVHDRYKRLFQAMQKEEVTAENIASFGIAESDLPQKIMDLISGNAHGKDVDAFIRLTVDDMLTDTERRIKRFKDDRKSIRSADNKMGKRGFKQISTGKLADFLAKDIVLFQPSVNDGENKITGLNYRIMQSAIAVYDSGDDYEAKQQFKLMFEKARLIGKGTTEPHPFLYKVFVRSIPANAVDFYERYLIERKFYLIGLSNEIKKGNRVDVPFIRRDQNKWKTPAMKTLGRIYSEDLPVELPRQMFDNEIKSHLKSLPQMEGIDFNNANVTYLIAEYMKRVLNDDFQTFYQWKRNYRYMDMLRGEYDRKGSLQHCFTSIEEREGLWKERASRTERYRKLASNKIRSNRQMRNASSEEIETILDKRLSNCRNEYQKSEKIIRRYRVQDALLFLLAKKTLTELADFDGERFKLKEIMPDAEKGILSEIMPMSFTFEKGGKIYTITSGGMKLKNYGDFFVLASDKRIGNLLELVGSNTVSKEDIMEEFKKYDQCRPEISSIVFNLEKWAFDTYPELPARVDRKEKVDFWSILDVLSNNKDINNEQSYILRKIRNAFDHNNYPDKGIVEIKALPEIAMSIKKAFGEYAIMK

SEQ ID NO: 145 - protein, 1131 aa, Phaeodactylibacter xiamenensis
MTNTPKRRTLHRHPSYFGAFLNIARHNAFMIMEHLSTKYDMEDKNTLDEAQLPNAKLFGCLKKRYGKPDVTEGVSRDLRRYFPFLNYPLFLHLEKQQNAEQAATYDINPEDIEFTLKGFFRLLNQMRNNYSHYISNTDYGKFDKLPVQDIYEAAIFRLLDRGKHTKRFDVFESKHTRHLESNNSEYRPRSLANSPDHENTVAFVTCLFLERKYAFPFLSRLDCFRSTNDAAEGDPLIRKASHECYTMFCCRLPQPKLESSDILLDMVNELGRCPSALYNLLSEEDQARFHIKREEITGFEEDPDEELEQEIVLKRHSDRFPYFALRYFDDTEAFQTLRFDVYLGRWRTKPVYKKRIYGQERDRVLTQSIRTFTRLSRLLPIYENVKHDAVRQNEEDGKLVNPDVTSQFHKSWIQIESDDRAFLSDRIEHFSPHYNFGDQVIGLKFINPDRYAAIQNVFPKLPGEEKKDKDAKLVNETADAIISTHEIRSLFLYHYLSKKPISAGDERRFIQVDTETFIKQYIDTIKLFFEDIKSGELQPIADPPNYQKNEPLPYVRGDKEKTQEERAQYRERQKEIKERRKELNTLLQNRYGLSIQYIPSRLREYLLGYKKVPYEKLALQKLRAQRKEVKKRIKDIEKMRTPRVGEQATWLAEDIVFLTPPKMHTPERKTTKHPQKLNNDQFRIMQSSLAYFSVNKKAIKKFFQKETGIGLSNRETSHPFLYRIDVGRCRGILDFYTGYLKYKMDWLDDAIKKVDNRKHGKKEAKKYEKYLPSSIQHKTPLELDYTRLPVYLPRGLFKKAIVKALAAHADFQVEPEEDNVIFCLDQLLDGDTQDFYNWQRYYRSALTEKETDNQLVLAHPYAEQILGTIKTLEGKQKNNKLGNKAKQKIKDELIDLKRAKRRLLDREQYLRAVQAEDRALWLMIQERQKQKAEHEEIAFDQLDLKNITKILTESIDARLRIPDTKVDITDKLPLRRYGDLRRVAKDRRLVNLASYYHVAGLSEIPYDLVKKELEEYDRRRVAFFEHVYQFEKEVYDRYAAELRNENPKGESTYFSHWEYVAVAVKHSADTHFNELFKEKVMQLRNKFHHNEFPYFDWLLPEVEKASAALYADRVFDVAEGYYQKMRKLMRQ

SEQ ID NO: 146 - protein, 1155 aa, Flavobacterium sp
MDNNITVEKTELGLGITYNHDKVEDKHYFGGFFNLAQNNIDLVAQEFKKRLLIQGKDSINIFANYFSDQCSITNLERGIKILAEYFPVVSYIDLDEKNKSKSIREHLILLLETINNLRNYYTHYYHKKIIIDGSLFPLLDTILLKVVLEIKKKKLKEDKTKQLLKKGLEKEMTILFNLMKAEQKEKKIKGWNIDENIKGAVLNRAFSHLLYNDELSDYRKSKYNTEDETLKDTLTESGILFLLSFFLNKKEQEQLKANIKGYKGKIASIPDEEITLKNNSLRNMATHWTYSHLTYKGLKHRIKTDHEKETLLVNMVDYLSKVPHEIYQNLSEQNKSLFLEDINEYMRDNEENHDSSEASRVIHPVIRKRYENKFAYFAIRFLDEFAEFPTLRFMVNVGNYIHDNRKKDIGGTSLITNRTIKQQINVFGNLTEIHKKKNDYFEKEENKEKTLEWELFPNPSYHFQKENIPIFIDLEKSKETNDLAKEYAKEKKKIFGSSRKKQQNTAKKNRETIINLVFDKYKTSDRKTVTFEQPTALLSFNELNSFLYAFLVENKTGKELEKIIIEKIANQYQILKNCSSTVDKTNDNIPKSIKKIVNTTTDSFYFEGKKIDIEKLEKDITIEIEKTNEKLETIKENEESAQNYKRNERNTQKRKLYRKYVFFTNEIGIEATWITNDILRFLDNKENWKGYQHSELQKFISQYDNYKKEALGLLESEWNLESDAFFGQNLKRMFQSNSTFETFYKKYLDNRKNTLETYLSAIENLKTMTDVRPKVLKKKWTELFRFFDKKIYLLSTIETKINELITKPINLSRGIFEEKPTFINGKNPNKENNQHLFANWFIYAKKQTILQDFYNLPLEQPKAITNLKKHKYKLERSINNLKIEDIYIKQMVDFLYQKLFEQSFIGSLQDLYTSKEKREIEKGKAKNEQTPDESFIWKKQVEINTHNGRIIAKTKIKDIGKFKNLLTDNKIAHLISYDDRIWDFSLNNDGDITKKLYSINTELESYETIRREKLLKQIQQFEQFLLEQETEYSAERKHPEKFEKDCNPNFKKYIIEGVLNKIIPNHEIEEIEILKSKEDVFKINFSDILILNNDNIKKGYLLIMIRNKFAHNQLIDKNLFNFSLQLYSKNENENFSEYLNKVCQNIIQEFKEKLK

SEQ ID NO: 147 - protein, 1175 aa, Porphyromonas gulae
MTEQSERPYNGTYYTLEDKHFWAAFLNLARHNAYITLTHIDRQLAYSKADITNDQDVLSFKALWKNFDNDLERKSRLRSLILKHFSFLEGAAYGKKLFESKSSGNKSSKNKELTKKEKEELQANALSLDNLKSILFDFLQKLKDFRNYYSHYRHSESSELPLFDGNMLQRLYNVFDVSVQRVKRDHEHNDKVDPHRHFNHLVRKGKKDRYGHNDNPSFKHHFVDSEGMVTEAGLLFFVSLFLEKRDAIWMQKKIRGFKGGTETYQQMTNEVFCRSRISLPKLKLESLRTDDWMLLDMLNELVRCPKPLYDRLREKDRARFRVPVDILPDEDDTDGGGEDPFKNTLVRHQDRFPYFALRYFDLKKVFTSLRFHIDLGTYHFAIYKKMIGEQPEDRHLTRNLYGFGRIQDFAEEHRPEEWKRLVRDLDYFETGDKPYISQTTPHYHIEKGKIGLRFMPEGQHLWPSPEVGTTRTGRSKYAQDKRLTAEAFLSVHELMPMMFYYFLLREKYSEEVSAEKVQGRIKRVIEDVYAIYDAFARDEINTLKELDACLADKGIRRGHLPKQMIAILSQEHKDMEEKIRKKLQEMIADTDHRLDMLDRQTDRKIRIGRKNAGLPKSGVIADWLVRDMMRFQPVAKDTSGKPLNNSKANSTEYRMLQRALALFGGEKKRLTPYFRQMNLTGGNNPHPFLHETRWESHTNILSFYRSYLRARKAFLERIGRSDRMENRPFLLLKEPKTDRQTLVAGWKSEFHLPRGIFTEAVRDCLIEMGYDEVGSYREVGFMAKAVPLYFERACEDRVQPFYDSPFNVGNSLKPKKGRFLSKEERAEEWERGKERFRDLEAWSHSAARRIEDAFAGIEYASPGNKKKIEQLLRDLSLWEAFESKLKVRADKINLAKLKKEILEAQEHPYHDFKSWQKFERELRLVKNQDIITWMMCRDLMEENKVEGLDTGTLYLKDIRPNVQEQGSLNVLNRVKPMRLPVVVYRADSRGHVHKEEAPLATVYIEERDTKLLKQGNFKSFVKDRRLNGLFSFVDTGGLAMEQYPISKLRVEYELAKYQTARVCVFELTLRLEESLLTRYPHLPDESFRKMLESWSDPLLAKWPELHGKVRLLIAVRNAFSHNQYPMYDEAVFSSIRKYDPSSPDAIEERMGLNIAHRLSEEVKQAKETVERIIQV

SEQ ID NO: 148 - protein, 1145 aa, Chryseobacterium sp.
METQTIGHGIAYDHSKIQDKHFFGGFLNLAENNIKAVLKAFSEKFNVGNVDVKQFADVSLKDNLPDNDFQKRVSFLKMYFPVVDFINIPNNRAKFRSDLTTLFKSVDQLRNFYTHYYHKPLDFDASLFILLDDIFARTAKEVRDQKMKDDKTRQLLSKSLSEELQKGYELQLERLKELNRLGKKVNIHDQLGIKNGVLNNAFNHLIYKDGESFKTKLTYSSALTSFESAENGIEISQSGLLFLLSMFLKRKEIEDLKNRNKGFKAKVVIDEDGKVNGLKFMATHWVFSYLCFKGLKSKLSTEFHEETLLIQIIDELSKVPDELYCAFDKETRDKFIEDINEYVKEGHQDFSLEDAKVIHPVIRKRYENKFNYFAIRFLDEFVKFPSLRFQVHVGNYVHDRRIKNIDGTTFETERVVKDRIKVFGRLSEISSYKAQYLSSVSDKHDETGWEIFPNPSYVFINNNIPIHISVDTSFKKEIADFKKLRRAQVPDELKIRGAEKKRKFEITQMIGSKSVLNQEEPIALLSLNEIPALLYEILINGKEPAEIERIIKDKLNERQDVIKNYNPENWLPASQISRRLRSNKGERIINTDKLLQLVTKELLVTEQKLKIISDNREALKQKKEGKYIRKFIFTNSELGREAIWLADDIKRFMPADVRKEWKGYQHSQLQQSLAFYNSRPKEALAILESSWNLKDEKIIWNEWILKSFTQNKFFDAFYNEYLKGRKKYFAFLSEHIVQYTSNAKNLQKFIKQQMPKDLFEKRHYIIEDLQTEKNKILSKPFIFPRGIFDKKPTFIKGVKVEDSPESFANWYQYGYQKDHQFQKFYDWKRDYSDVFLEHLGKPFINNGDRRTLGMEELKERIIIKQDLKIKKIKIQDLFLRLIAENLFQKVFKYSAKLPLSDFYLTQEERMEKENMAALQNVREEGDKSPNIIKDNFIWSKMIPYKKGQIIENAVKLKDIGKLNVLSLDDKVQTLLSYDDAKPWSKIALENEFSIGENSYEVIRREKLFKEIQQFESEILFRSGWDGINHPAQLEDNRNPKFKMYIVNGILRKSAGLYSQGEDIWFEYNADFNNLDADVLETKSELVQLAFLVTAIRNKFAHNQLPAKEFYFYIRAKYGFADEPSVALVYLNFTKYAINEFKKVMI

SEQ ID NO: 149 - protein, 948 aa, Riemerella anatipestifer
MFFSFHNAQRVIFKHLYKAFDASLRMVKEDYKAHFTVNLTRDFAHLNRKGKNKQDNPDFNRYRFEKDGFFTESGLLFFTNLFLDKRDAYWMLKKVSGFKASHKQREKMTTEVFCRSRILLPKLRLESRYDHNQMLLDMLSELSRCPKLLYEKLSEENKKHFQVEADGFLDEIEEEQNPFKDTLIRHQDRFPYFALRYLDLNESFKSIRFQVDLGTYHYCIYDKKIGDEQEKRHLTRTLLSFGRLQDFTEINRPQEWKALTKDLDYKETSNQPFISKTTPHYHITDNKIGFRLGTSKELYPSLEIKDGANRIAKYPYNSGFVAHAFISVHELLPLMFYQHLTGKSEDLLKETVRHIQRIYKDFEEERINTIEDLEKANQGRLPLGAFPKQMLGLLQNKQPDLSEKAKIKIEKLIAETKLLSHRLNTKLKSSPKLGKRREKLIKTGVLADWLVKDFMRFQPVAYDAQNQPIKSSKANSTEFWFIRRALALYGGEKNRLEGYFKQTNLIGNTNPHPFLNKFNWKACRNLVDFYQQYLEQREKFLEAIKNQPWEPYQYCLLLKIPKENRKNLVKGWEQGGISLPRGLFTEAIRETLSEDLMLSKPIRKEIKKHGRVGFISRAITLYFKEKYQDKHQSFYNLSYKLEAKAPLLKREEHYEYWQQNKPQSPTESQRLELHTSDRWKDYLLYKRWQHLEKKLRLYRNQDVMLWLMTLELTKNHFKELNLNYHQLKLENLAVNVQEADAKLNPLNQTLPMVLPVKVYPATAFGEVQYHKTPIRTVYIREEHTKALKMGNFKALVKDRRLNGLFSFIKEENDTQKHPISQLRLRRELEIYQSLRVDAFKETLSLEEKLLNKHTSLSSLENEFRALLEEWKKEYAASSMVTDEHIAFIASVRNAFCHNQYPFYKEALHAPIPLFTVAQPTTEEKDGLGIAEALLKVLREYCEIVKSQI

SEQ ID NO: 150 - protein, 1175 aa, Porphyromonas gingivalis
MTEQNEKPYNGTYYTLEDKHFWAAFFNLARHNAYITLAHIDRQLAYSKADITNDEDILFFKGQWKNLDNDLERKARLRSLILKHFSFLEGAAYGKKLFESQSSGNKSSKKKELTKKEKEELQANALSLDNLKSILFDFLQKLKDFRNYYSHYRHPESSELPLFDGNMLQRLYNVFDVSVQRVKRDHEHNDKVDPHRHFNHLVRKGKKDKYGNNDNPFFKHHFVDREEKVTEAGLLFFVSLFLEKRDAIWMQKKIRGFKGGTEAYQQMTNEVFCRSRISLPKLKLESLRTDDWMLLDMLNELVRCPKLLYDRLREEDRARFRVPVDILSDEDDTDGTEEDPFKNTLVRHQDRFPYFALRYFDLKKVFTSLRFHIDLGTYHFAIYKKNIGEQPEDRHLTRNLYGFGRIQDFAEEHRPEEWKRLVRDLDYFETGDKPYITQTTPHYHIEKGKIGLRFVPEGQLLWPSPEVGATRTGRSKYAQDKRFTAEAFLSVHELMPMMFYYFLLREKYSEEASAEKVQGRIKRVIEDVYAVYDAFARDEINTRDELDACLADKGIRRGHLPRQMIAILSQEHKDMEEKVRKKLQEMIADTDHRLDMLDRQTDRKIRIGRKNAGLPKSGVIADWLVRDMMRFQPVAKDTSGKPLNNSKANSTEYRMLQRALALFGGEKERLTPYFRQMNLTGGNNPHPFLHETRWESHTNILSFYRSYLKARKAFLQSIGRSDREENHRFLLLKEPKTDRQTLVAGWKSEFHLPRGIFTEAVRDCLIEMGYDEVGSYKEVGFMAKAVPLYFERACKDRVQPFYDYPFNVGNSLKPKKGRFLSKEKRAEEWESGKERFRDLEAWSHSAARRIEDAFVGIEYASWENKKKIEQLLQDLSLWETFESKLKVKADKINIAKLKKEILEAKEHPYHDFKSWQKFERELRLVKNQDIITWMMCRDLMEENKVEGLDTGTLYLKDIRTDVQEQGSLNVLNHVKPMRLPVVVYRADSRGHVHKEEAPLATVYIEERDTKLLKQGNFKSFVKDRRLNGLFSFVDTGALAMEQYPISKLRVEYELAKYQTARVCAFEQTLELEESLLTRYPHLPDESFREMLESWSDPLLDKWPDLQREVRLLIAVRNAFSHNQYPMYDETIFSSIRKYDPSSLDAIEERMGLNIAHRLSEEVKLAKEMVERIIQA

SEQ ID NO: 151 - protein, 1175 aa, Porphyromonas gingivalis
MTEQNEKPYNGTYYTLKDKHFWAAFFNLARHNAYITLTHIDRQLAYSKADITNDEDILFFKGQWKNLDNDLERKARLRSLILKHFSFLEGAAYGKKLFESQSSGNKSSKKKELTKKEKEELQANALSLDNLKSILFDFLQKLKDFRNYYSHYRHPESSELPMFDGNMLQRLYNVFDVSVQRVKRDHEHNDKVDPHRHFNHLVRKGKKDRCGNNDNPFFKHHFVDREGKVTEAGLLFFVSLFLEKRDAIWMQKKIRGFKGGTETYQQMTNEVFCRSRISLPKLKLESLRTDDWMLLDMLNELVRCPKSLYDRLREEDRACFRVPVDILSDEDDTDGAEEDPFKNTLVRHQDRFPYFALRYFDLKKVFTSLRFHIDLGTYHFAIYKKNIGEQPEDRHLTRNLYGFGRIQDFAEEHRPEEWKRLVRDLDCFETGDKPYITQTTPHYHIEKGKIGLRFVPEGQHLWPSPEVGATRTGRSKYAQDKRFTAEAFLSVHELMPMMFYYFLLREKYSEEVSAERVQGRIKRVIEDVYAVYDAFARDEINTRDELDACLADKGIRRGHLPRQMIAILSQKHKDMEEKVRKKLQEMIADTDHRLDMLDRQTDRKIRIGRKNAGLPKSGVIADWLVRDMMRFQPVAKDTSGKPLNNSKANSTEYRMLQRALALFGGEKERLTPYFRQMNLTGGNNPHPFLHETRWESHTNILSFYRSYLKARKAFLQSIGRSDRVENHRFLLLKEPKTDRQTLVAGWKGEFHLPRGIFTEAVRDCLIEMGLDEVGSYKEVGFMAKAVPLYFERACKDRVQPFYDYPFNVGNSLKPKKGRFLSKEKRAEEWESGKERFRDLEAWSHSAARRIEDAFAGIENASRENKKKIEQLLQDLSLWETFESKLKVKADKINIAKLKKEILEAKEHPYLDFKSWQKFERELRLVKNQDIITWMMCRDLMEENKVEGLDTGTLYLKDIRTDVQEQGSLNVLNHVKPMRLPVVVYRADSRGHVHKEQAPLATVYIEERDTKLLKQGNFKSFVKDRRLNGLFSFVDTGALAMEQYPISKLRVEYELAKYQTARVCAFEQTLELEESLLTRYPHLPDENFRKMLESWSDPLLDKWPDLHRKVRLLIAVRNAFSHNQYPMYDEAVFSSIRKYDPSSPDAIEERMGLNIAHRLSEEVKQAKEMAERIIQA

SEQ ID NO: 152 - protein, 1213 aa, Flavobacterium columnare
MSSKNESYNKQKTFNHYKQEDKYFFGGFLNNADDNLRQVGKEFKTRINFNHNNNELASVFKDYFNKEKSVAKREHALNLLSNYFPVLERIQKHTNHNFEQTREIFELLLDTIKKLRDYYTHHYHKPITINPKVYDFLDDTLLDVLITIKKKKVKNDTSRELLKEKFRPELTQLKNQKREELIKKGKKLLEENLENAVFNHCLRPFLEENKTDDKQNKTVSLRKYRKSKPNEETSITLTQSGLVFLISFFLHRKEFQVFTSGLEGFKAKVNTIKEEEISLNKNNIVYMITHWSYSYYNFKGLKHRIKTDQGVSTLEQNNTTHSLTNTNTKEALLTQIVDYLSKVPNEIYETLSEKQQKEFEEDINEYMRENPENEDSTFSSIVSHKVIRKRYENKFNYFAMRFLDEYAELPTLRFMVNFGDYIKDRQKKILESIQFDSERIIKKEIHLFEKLGLVTEYKKNVYLKETSNIDLSRFPLFPSPSYVMANNNIPFYIDSRSNNLDEYLNQKKKAQSQNRKRNLTFEKYNKEQSKDAIIAMLQKEIGVKDLQQRSTIGLLSCNELPSMLYEVIVKDIKGAELENKIAQKIREQYQSIRDFTLDSPQKDNIPTTLTKTISTDTSVTFENQPIDIPRLKNALQKELTLTQEKLLNVKQHEIEVDNYNRNKNTYKFKNQPKDKVDDNKLQRKYVFYRNEIGQEANWLASDLIHFMKNKSLWKGYMHNELQSFLAFFEDKKNDCIALLETVFNLKEDCILTKDLKNLFLKHGNFIDFYKEYLKLKEDFLNTESTFLENGFIGLPPKILKKELSKRLNYIFIVFQKRQFIIKELEEKKNNLYADAINLSRGIFDEKPTMIPFKKPNPDEFASWFVASYQYNNYQSFYELTPDKIENDKKKKYKNLRAINKVKIQDYYLKLMVDTLYQDLFNQPLDKSLSDFYVSKTDREKIKADAKAYQKRNDSFLWNKVIHLSLQNNRITANPKLKDIGKYKRALQDEKIATLLTYDDRTWTYALQKPEKENENDYKELHYTALNMELQEYEKVRSKKLLKQVQELEKQILDKFYDFSNNATHPEDLEIEDKKGKRHPNFKLYITKALLKNESEIINLENIDIEILIKYYDYNTEKLKEKIKNMDEDEKAKIVNTKENYNKITNVLIKKALVLIIIRNKMAHNQYPPKFIYDLATRFVPKKEEEYFACYFNRVFETITTELWENKKKAKEIV

SEQ ID NO: 153 - protein, 1119 aa, Porphyromonas gingivalis
MTEQNERPYNGTYYTLEDKHFWAAFFNLARHNAYITLTHIDRQLAYSKADITNDEDILFFKGQWKNLDNDLERKARLRSLILKHFSFLEGAAYGKKLFENKSSGNKSSKKKELTKKEKEELQANALSLDNLKSILFDFLQKLKDFRNYYSHYRHPESSELPLFDGNMLQRLYNVFDVSVQRVKRDHEHNDKVDPHRHFNHLVRKGKKDRCGNNDNPFFKHHFVDREGKVTEAGLLFFVSLFLEKRDAIWMQKKIRGFKGGTEAYQQMTNEVFCRSRISLPKLKLESLRTDDWMLLDMLNELVRCPKSLYDRLREEDRARFRVPVDILSDEDDTDGTEEDPFKNTLVRHQDRFPYFALRYFDLKKVFTSLRFHIDLGTYHFAIYKKNIGEQPEDRHLTRNLYGFGRIQDFAEEHRPEEWKRLVRDLDYFETGDKPYITQTTPHYHIEKGKIGLRFVPEGQHLWPSPEVGATRTGRSKYAQDKRLTAEAFLSVHELMPMMFYYFLLREKYSEEVSAEKVQGRIKRVIEDVYAVYDAFARGEIDTLDRLDACLADKGIRRGHLPRQMIAILSQEHKDMEEKVRKKLQEMIADTDHRLDMLDRQTDRKIRIGRKNAGLPKSGVIADWLVRDMMRFQPVAKDTSGKPLNNSKANSTEYRMLQRALALFGGEKERLTPYFRQMNLTGGNNPHPFLHETRWESHTNILSFYRSYLKARKAFLQSIGRSDREENHRFLLLKEPKTDRQTLVAGWKSEFHLPRGIFTEAVRDCLIEMGYDEVGSYKEVGFMAKAVPLYFERACKDRVQPFYDYPFNVGNSLKPKKGRFLSKEKRAEEWESGKERFRLAKLKKEILEAKEHPYLDFKSWQKFERELRLVKNQDIITWMMCRDLMEENKVEGLDTGTLYLKDIRTEVQEQGSLNVLNRVKPMRLPVVVYRADSRGHVHKEQAPLATVYIEERDTKLLKQGNFKSFVKDRRLNGLFSFVDTGGLAMEQYPISKLRVEYELAKYQTARVCAFEQTLELEESLLTRCPHLPDKNFRKMLESWSDPLLDKWPDLQREVWLLIAVRNAFSHNQYPMYDEAVFSSIRKYDPSSPDAIEERMGLNIAHRLSEEVKQAKEMAERIIQA

SEQ ID NO: 154 - protein, 1135 aa, Porphyromonas gingivalis
MNTVPASENKGQSRTVEDDPQYFGLYLNLARENLIEVESHVRIKFGKKKLNEESLKQSLLCDHLLSVDRWTKVYGHSRRYLPFLHYFDPDSQIEKDHDSKTGVDPDSAQRLIRELYSLLDFLRNDFSHNRLDGTTFEHLEVSPDISSFITGTYSLACGRAQSRFADFFKPDDFVLAKNRKEQLISVADGKECLTVSGLAFFICLFLDREQASGMLSRIRGFKRTDENWARAVHETFCDLCIRHPHDRLESSNTKEALLLDMLNELNRCPRILYDMLPEEERAQFLPALDENSMNNLSENSLNEESRLLWDGSSDWAEALTKRIRHQDRFPYLMLRFIEEMDLLKGIRFRVDLGEIELDSYSKKVGRNGEYDRTITDHALAFGKLSDFQNEEEVSRMISGEASYPVRFSLFAPRYAIYDNKIGYCHTSDPVYPKSKTGEKRALSNPQSMGFISVHDLRKLLLMELLCEGSFSRMQSGFLRKANRILDETAEGKLQFSALFPEMRHRFIPPQNPKSKDRREKAETTLEKYKQEIKGRKDKLNSQLLSAFDMNQRQLPSRLLDEWMNIRPASHSVKLRTYVKQLNEDCRLRLRKFRKDGDGKARAIPLVGEMATFLSQDIVRMIISEETKKLITSAYYNEMQRSLAQYAGEENRRQFRAIVAELHLLDPSSGHPFLSATMETAHRYTEDFYKCYLEKKREWLAKTFYRPEQDENTKRRISVFFVPDGEARKLLPLLIRRRMKEQNDLQDWIRNKQAHPIDLPSHLFDSKIMELLKVKDGKKKWNEAFKDWWSTKYPDGMQPFYGLRRELNIHGKSVSYIPSDGKKFADCYTHLMEKTVQDKKRELRTAGKPVPPDLAADIKRSFHRAVNEREFMLRLVQEDDRLMLMAINKMMTDREEDILPGLKNIDSILDKENQFSLAVHAKVLEKEGEGGDNSLSLVPATIEIKSKRKDWSKYIRYRYDRRVPGLMSHFPEHKATLDEVKTLLGEYDRCRIKIFDWAFALEGAIMSDRDLKPYLHESSSREGKSGEHSTLVKMLVEKKGCLTPDESQYLILIRNKAAHNQFPCAAEMPLIYRDVSAKVGSIEGSSAKDLPEGSSLVDSLWKKYEMIIRKILPILDPENRFFGKLLNNMSQPINDL

SEQ ID NO: 155 - protein, 950 aa, Riemerella anatipestifer
MFFSFHNAQRVIFKHLYKAFDASLRMVKEDYKAHFTVNLTRDFAHLNRKGKNKQDNPDFNRYRFEKDGFFTESGLLFFTNLFLDKRDAYWMLKKVSGFKASHKQSEKMTTEVFCRSRILLPKLRLESRYDHNQMLLDMLSELSRCPKLLYEKLSEKDKKCFQVEADGFLDEIEEEQNPFKDTLIRHQDRFPYFALRYLDLNESFKSIRFQVDLGTYHYCIYDKKIGYEQEKRHLTRTLLNFGRLQDFTEINRPQEWKALTKDLDYNETSNQPFISKTTPHYHITDNKIGFRLRTSKELYPSLEVKDGANRIAKYPYNSDFVAHAFISISVHELLPLMFYQHLTGKSEDLLKETVRHIQRIYKDFEEERINTIEDLEKANQGRLPLGAFPKQMLGLLQNKQPDLSEKAKIKIEKLIAETKLLSHRLNTKLKSSPKLGKRREKLIKTGVLADWLVKDFMRFQPVVYDAQNQPIKSSKANSTESRLIRRALALYGGEKNRLEGYFKQTNLIGNTNPHPFLNKFNWKACRNLVDFYQQYLEQREKFLEAIKHQPWEPYQYCLLLKVPKENRKNLVKGWEQGGISLPRGLFTEAIRETLSKDLTLSKPIRKEIKKHGRVGFISRAITLYFKEKYQDKHQSFYNLSYKLEAKAPLLKKEEHYEYWQQNKPQSPTESQRLELHTSDRWKDYLLYKRWQHLEKKLRLYRNQDIMLWLMTLELTKNHFKELNLNYHQLKLENLAVNVQEADAKLNPLNQTLPMVLPVKVYPTTAFGEVQYHETPIRTVYIREEQTKALKMGNFKALVKDRHLNGLFSFIKEENDTQKHPISQLRLRRELEIYQSLRVDAFKETLSLEEKLLNKHASLSSLENEFRTLLEEWKKKYAASSMVTDKHIAFIASVRNAFCHNQYPFYKETLHAPILLFTVAQPTTEEKDGLGIAEALLRVLREYCEIVKSQI

SEQ ID NO: 156 - protein, 1213 aa, Flavobacterium columnare
MSSKNESYNKQKTFNHYKQEDKYFFGGFLNNADDNLRQVGKEFKTRINFNHNNNELASVFKDYFNKEKSVAKREHALNLLSNYFPVLERIQKHTNHNFEQTREIFELLLDTIKKLRDYYTHHYHKPITINPKIYDFLDDTLLDVLITIKKKKVKNDTSRELLKEKLRPELTQLKNQKREELIKKGKKLLEENLENAVFNHCLRPFLEENKTDDKQNKTVSLRKYRKSKPNEETSITLTQSGLVFLMSFFLHRKEFQVFTSGLEGFKAKVNTIKEEKISLNKNNIVYMITHWSYSYYNFKGLKHRIKTDQGVSTLEQNNTTHSLTNTNTKEALLTQIVDYLSKVPNEIYETLSEKQQKEFEEDINEYMRENPENEDSTFSSIVSHKVIRKRYENKFNYFAMRFLDEYAELPTLRFMVNFGDYIKDRQKKILESIQFDSERIIKKEIHLFEKLGLVTEYKKNVYLKETSNIDLSRFPLFPSPSYVMANNNIPFYIDSRSNNLDEYLNQKKKAQSQNRKRNLTFEKYNKEQSKDAIIAMLQKEIGVKDLQQRSTIGLLSCNELPSMLYEVIVKDIKGAELENKIAQKIREQYQSIRDFTLNSPQKDNIPTTLIKTISTDTSVTFENQPIDIPRLKNAIQKELALTQEKLLNVKQHEIEVNNYNRNKNTYKFKNQPKDKVDDNKLQRKYVFYRNEIGQEANWLASDLIHFMKNKSLWKGYMHNELQSFLAFFEDKKNDCIALLETVFNLKEDCILTKDLKNLFLKHGNFIDFYKEYLKLKEDFLNTESTFLENGFIGLPPKILKKELSKRLNYIFIVFQKRQFIIKELEEKKNNLYADAINLSRGIFDEKPTMIPFKKPNPDEFASWFVASYQYNNYQSFYELTPDKIENDKKKKYKNLRAINKVKIQDYYLKLMVDTLYQDLFNQPLDKSLSDFYVSKTDREKIKADAKAYQKRNDSFLWNKVIHLSLQNNRITANPKLKDIGKYKRALQDEKIATLLTYDDRTWTYALQKPEKENENDYKELHYTALNMELQEYEKVRSKKLLKQVQELEKQILDKFYDFSNNATHPEDLEIEDKKGKRHPNFKLYITKALLKNESEIINLENIDIEILIKYYDYNTEKLKEKIKNMDEDEKAKIVNTKENYNKITNVLIKKALVLIIIRNKMAHNQYPPKFIYDLATRFVPKKEEEYFACYFNRVFETITTELWENKKKAKEIV

SEQ ID NO: 157 - protein, 1095 aa, Riemerella anatipestifer
MEKPLPPNVYTLKHKFFWGAFLNIARHNAFITICHINEQLGLTTPPNDDKIADVVCGTWNNILNNDHDLLKKSQLTELILKHFPFLAAMCYHPPKKEGKKKGSQKEQQKEKENEAQSQAEALNPSELIKVLKTLVKQLRTLRNYYSHHSHKKPDAEKDIFKHLYKAFDASLRMVKEDYKAHFTVNLTQDFAHLNRKGKNKQDNPDFDRYRFEKDGFFTESGLLFFTNLFLDKRDAYWMLKKVSGFKASHKQSEKMTTEVFCRSRILLPKLRLESRYDHNQMLLDMLSELSRYPKLLYEKLSEEDKKRFQVEADGFLDEIEEEQNPFKDTLIRHQDRFPYFALRYLDLNESFKSIRFQVDLGTYHYCIYDKKIGDEQEKRHLTRTLLSFGRLQDFTEINRPQEWKALTKDLDYKETSKQPFISKTTPHYHITDNKIGFRLGTSKELYPSLEVKDGANRIAQYPYNSDFVAHAFISVHELLPLMFYQHLTGKSEDLLKETVRHIQRIYKDFEEERINTIEDLEKANQGRLPLGAFPKQMLGLLQNKQPDLSEKAKIKIEKLIAETKLLSHRLNTKLKSSPKLGKRREKLIKTGVLADWLVKDFMRFQPVAYDAQNQPIESSKANSTEFQLIQRALALYGGEKNRLEGYFKQTNLIGNTNPHPFLNKFNWKACRNLVDFYQQYLEQREKFLEAIKNQPWEPYQYCLLLKIPKENRKNLVKGWEQGGISLPRGLFTEAIRETLSKDLTLSKPIRKEIKKHGRVGFISRAITLYFREKYQDDHQSFYDLPYKLEAKASPLPKKEHYEYWQQNKPQSPTELQRLELHTSDRWKDYLLYKRWQHLEKKLRLYRNQDVMLWLMTLELTKNHFKELNLNYHQLKLENLAVNVQEADAKLNPLNQTLPMVLPVKVYPATAFGEVQYQETPIRTVYIREEQTKALKMGNFKALVKDRRLNGLFSFIKEENDTQKHPISQLRLRRELEIYQSLRVDAFKETLNLEEKLLKKHTSLSSVENKFRILLEEWKKEYAASSMVTDEHIAFIASVRNAFCHNQYPFYEEALHAPIPLFTVAQQTTEEKDGLGIAEALLRVLREYCEIVKSQI

SEQ ID NO: 158 - protein, 1149 aa, Sinomicrobium oceani
MESTTTLGLHLKYQHDLFEDKHYFGGGVNLAVQNIESIFQAFAERYGIQNPLRKNGVPAINNIFHDNISISNYKEYLKFLKQYLPVVGFLEKSNEINIFEFREDFEILINAIYKLRHFYTHYYHSPIKLEDRFYTCLNELFVAVAIQVKKHKMKSDKTRQLLNKNLHQLLQQLIEQKREKLKDKKAEGEKVSLDTKSIENAVLNDAFVHLLDKDENIRLNYSSRLSEDIITKNGITLSISGLLFLLSLFLQRKEAEDLRSRIEGFKGKGNELRFMATHWVFSYLNVKRIKHRLNTDFQKETLLIQIADELSKVPDEVYKTLDHENRSKFLEDINEYIREGNEDASLNESTVVHGVIRKRYENKFHYLVLRYLDEFVDFPSLRFQVHLGNYIHDRRDKVIDGTNFITNRVIKEPIKVFGKLSHVSKLKSDYMESLSREHKNGWDVFPNPSYNFVGHNIPIFINLRSASSKGKELYRDLMKIKSEKKKKSREEGIPMERRDGKPTKIEISNQIDRNIKDNNFKDIYPGEPLAMLSLNELPALLFELLRRPSITPQDIEDRMVEKLYERFQIIRDYKPGDGLSTSKISKKLRKADNSTRLDGKKLLRAIQTETRNAREKLHTLEENKALQKNRKRRTVYTTREQGREASWLAQDLKRFMPIASRKEWRGYHHSQLQQILAFYDQNPKQPLELLEQFWDLKEDTYVWNSWIHKSLSQHNGFVPMYEGYLKGRLGYYKKLESDIIGFLEEHKVLKRYYTQQHLNVIFRERLYFIKTETKQKLELLARPLVFPRGIFDDKPTFVQDKKVVDHPELFADWYVYSYKDDHSFQEFYHYKRDYNEIFETELSWDIDFKDNKRQLNPSEQMDLFRMKWDLKIKKIKIQDIFLKIVAEDIYLKIFGHKIPLSLSDFYISRQERLTLDEQAVAQSMRLPGDTSENQIKESNLWQTTVPYEKEQIREPKIKLKDIGKFKYFLQQQKVLNLLKYDPQHVWTKAELEEELYIGKHSYEVVRREMLLQKCHQLEKHILEQFRFDGSNHPRELEQGNHPNFKMYIVNGILTKRGELEIEAENWWLELGNSKNSLDKVEVELLTMKTIPEQKAFLLILIRNKFAHNQLPADNYFHYASNLMNLKKSDTYSLFWFTVADTIVQEFMSL

SEQ ID NO: 159 - protein, 1133 aa, Reichenbachiella agariperforans
MKTNPLIASSGEKPNYKKFNTESDKSFKKIFQNKGSIAPIAEKACKNFEIKSKSPVNRDGRLHYFSVGHAFKNIDSKNVFRYELDESQMDMKPTQFLALQKEFFDFQGALNGLLKHIRNVNSHYVHTFEKLEIQSINQKLITFLIEAFELAVIHSYLNEEELSYEAYKDDPQSGQKLVQFLCDKFYPNKEHEVEERKTILAKNKRQALEHLLFIEVTSDIDWKLFEKHKVFTISNGKYLSFHACLFLLSLFLYKSEANQLISKIKGFKRNDDNQYRSKRQIFTFFSKKFTSQDVNSEEQHLVKFRDVIQYLNHYPSAWNKHLELKSGYPQMTDKLMRYIVEAEIYRSFPDQTDNHRFLLFAIREFFGQSCLDTWTGNTPINFSNQEQKGFSYEINTSAEIKDIETKLKALVLKGPLNFKEKKEQNRLEKDLRREKKEQPTNRVKEKLLTRIQHNMLYVSYGRNQDRFMDFAARFLAETDYFGKDAKFKMYQFYTSDEQRDHLKEQKKELPKKEFEKLKYHQSKLVDYFTYAEQQARYPDWDTPFVVENNAIQIKVTLFNGAKKIVSVQRNLMLYLLEDALYSEKRENAGKGLISGYFVHHQKELKDQLDILEKETEISREQKREFKKLLPKRLLHRYSPAQINDTTEWNPMEVILEEAKAQEQRYQLLLEKAILHQTEEDFLKRNKGKQFKLRFVRKAWHLMYLKELYMNKVAEHGHHKSFHITKEEFNDFCRWMFAFDEVPKYKEYLCDYFSQKGFFNNAEFKDLIESSTSLNDLYEKTKQRFEGWSKDLTKQSDENKYLLANYESMLKDDMLYVNISHFISYLESKGKINRNAHGHIAYKALNNVPHLIEEYYYKDRLAPEEYKSHGKLYNKLKTVKLEDALLYEMAMHYLSLEPALVPKVKTKVKDILSSNIAFDIKDAAGHHLYHLLIPFHKIDSFVALINHQSQQEKDPDKTSFLAKIQPYLEKVKNSKDLKAVYHYYKDTPHTLRYEDLNMIHSHIVSQSVQFTKVALKLEEYFIAKKSITLQIARQISYSEIADLSNYFTDEVRNTAFHFDVPETAYSMILQGIESEFLDREIKPQKPKSLSELSTQQVSVCTAFLETLHNNLFDRKDDKKERLSKARERYFEQIN

SEQ ID NO: 160 - DNA, 30 bp, Fusobacterium necrophorum
gactaaatccaagtagattggaattttaac

SEQ ID NO: 161 - DNA, 30 bp, Fusobacterium necrophorum; identical to SEQ ID NO: 160

SEQ ID NO: 162 - DNA, 30 bp, Fusobacterium necrophorum; identical to SEQ ID NO: 160

SEQ ID NO: 163 - DNA, 30 bp, Fusobacterium necrophorum
gttaaaattccaatctacttggatttagtc

SEQ ID NO: 164 - DNA, 30 bp, Fusobacterium perfoetens
gactaaaaccaagtaaattggtatttaaac

SEQ ID NO: 165 - DNA, 28 bp, Fusobacterium ulcerans
gactaaatccatgtaagtggaatttaaa

SEQ ID NO: 166 - DNA, 30 bp, Anaerosalibacter sp.
ggactatactcactaaggtgagaataaaac

SEQ ID NO: 167 - protein, 1111 aa, Anaerosalibacter massiliensis; identical to SEQ ID NO: 38

SEQ ID NO: 168 - protein, 919 aa, Cetobacterium sp.
MEEIKHKKNKSSIIRVIVSNYDMTGIKEIKVLYQKQGGVDTFNLKTIINLESGNLEIISCKPKEREKYRYEFNCKTEINTISITKKDKVLKKEIRKYSLELYFKNEKKDTVVAKVTDLLKAPDKIEGERNHLRKLSSSTERKLLSKTLCKNYSEISKTPIEEIDSIKIYKIKRFLNYRSNFLIYFALINDFLCAGVKEDDINEVWLIQDKEHTAFLENRIEKITDYIFDKLSKDIENKKNQFEKRIKKYKTSLEELKTETLEKNKTFYIDSIKTKITNLENKITELSLYNSKESLKEDLIKIISIFTNLRHSLMHYDYKSFENLFENIENEELKNLLDLNLFKSIRMSDEFKTKNRTNYLDGTESFTIVKKHQNLKKLYTYYNNLCDKKNGFNTFINSFFVTDGIENTDFKNLIILHFEKEMEEYKKSIEYYKIKISNEKNKSKKEKLKEKIDLLQSELINMREHKNLLKQIYFFDIHNSIKYKELYSERKNLIEQYNLQINGVKDVTAINHINTKLLSLKNKMDKITKQNSLYRLKYKLKIAYSFLMIEFDGDVSKFKNNFDPTNLEKRVEYLDKKEEYLNYTAPKNKFNFAKLEEELQKIQSTSEMGADYLNVSPENNLFKFYILTYIMLPVEFKGDFLGFVKNHYYNIKNVDFMDESLLDENEVDSNKLNEKIENLKDSSFFNKIRLFEKNIKKYEIVKYSVSTQENMKEYFKQLNLDIPYLDYKSTDEIGIFNKNMILPIFKYYQNVFKLCNDIEIHALLALANKKQQNLEYAIYCCSKKNSLNYNELLKTFNRKTYQNLSFIRNKIAHLNYKELFSDLFNNELDLNTKVRCLIEFSQNNKFDQIDLGMNFINDYYMKKTRFIFNQRRLRDLNVPSKEKIIDGKRKQQNDSNNELLKKYGLSRTNIKDIFNKAWY

SEQ ID NO: 169 - protein, 1115 aa, Fusobacterium necrophorum; identical to SEQ ID NO: 32

SEQ ID NO: 170 - protein, 1111 aa, Fusobacterium necrophorum; identical to SEQ ID NO: 33

SEQ ID NO: 171 - protein, 1108 aa, Fusobacterium necrophorum
VRYRKQAQLDTFIIKTEIVNNDIFIKSIIEKAREKYRYSFLFDGEEKYHFKNKSSVEIVKNDIFSQTPDNMIRNYKITLKISEKNPRVVEAEIEDLMNSTILKDGRRSARREKSMTERKLIEEKVAENYSLLANCPIEEVDSIKIYKIKRFLTYRSNMLLYFASINSFLCEGIKGKDNETEEIWHLKDNDVRKEKVKENFKNKLIQSTENYNSSLKNQIEEKEKLSSKEFKKGAFYRTIIKKLQQERIKELSEKSLTEDCEKIIKLYSELRHPLMHYDYQYFENLFENKENSELTKNLNLDIFKSLPLVRKMKLNNKVNYLEDNDTLFVLQKTKKAKTLYQIYDALCEQKNGFNKFINDFFVSDGEENTVFKQIINEKFQSEMEFLEKRISESEKKNEKLKKKLDSMKAHFRNINSEDTKEAYFWDIHSSRNYKTKYNERKNLVNEYTKLLGSSKEKKLLREEITKINRQLLKLKQEMEEITKKNSLFRLEYKMKIAFGFLFCEFDGNISKFKDEFDASNQEKIIQYHKNGEKYLTSFLKEEEKEKFNLEKMQKIIQKTEEEDWLLPETKNNLFKFYLLTYLLLPYELKGDFLGFVKKHYYDIKNVDFMDENQNNIQVSQTVEKQEDYFYHKIRLFEKNTKKYEIVKYSIVPNEKLKQYFEDLGIDIKYLTGSVESGEKWLGENLGIDIKYLTVEQKSEVSEEKNKKVSLKNNGMFNKTILLFVFKYYQIAFKLFNDIELYSLFFLREKSEKPFEVFLEELKDKMIGKQLNFGQLLYVVYEVLVKNKDLDKILSKKIDYRKDKSFSPEIAYLRNFLSHLNYSKFLDNFMKINTNKSDENKEVLIPSIKIQKMIQFIEKCNLQNQIDFDFNFVNDFYMRKEKMFFIQLKQIFPDINSTEKQKKSEKEEILRKRYHLINKKNEQIKDEHEAQSQLYEKILSLQKIFSCDKNNFYRRLKEEKLLFLEKQGKKKISMKEIKDKIASDISDLLGILKKEITRDIKDKLTEKFRYCEEKLLNISFYNHQDKKKEEGIRVFLIRDKNSDNFKFESILDDGSNKIFISKNGKEITIQCCDKVLETLMIEKNTLKISSNGKIISLIPHYSYSIDVKY

SEQ ID NO: 172 - protein, 1137 aa, Fusobacterium necrophorum
MEKFRRQNRNSIIKIIISNYDTKGIKELKVRYRKQAQLDTFIIKTEIVNNDIFIKSIIEKAREKYRYSFLFDGEEKYHFKNKSSVEIVKKDIFSQTPDNMIRNYKITLKISEKNPRVVEAEIEDLMNSTILKDGRRSARREKSMTERKLIEEKVAKNYSLLANCPMEEVDSIKIYKIKRFLTYRSNMLLYFASINSFLCEGIKGKDNETEEIWHLKDNDVRKEKVRENFKNKLIQSTENYNSSLKNQIEEKEKLLRKEFKKGAFYRTIIKKLQQERIKELSEKSLTEDCEKIIKLYSKLRHSLMHYDYQYFENLFENKKNDDLMKDLNLDLFKSLPLIRKMKLNNKVNYLEDGDTLFVLQKTKKAKTLYQIYDALCEQKNGFNKFINDFFVSDGEENTVFKQIINEKFQSEMEFLEKRISESEKKNEKLKKKLDSMKAHFRNINSEDTKEAYFWDIHSSRNYKTKYNERKNLVNEYTELLGSSKEKKLLREEITKINRQLLKLKQEMEEITKKNSLFRLEYKMKIAFGFLFCEFDGNISKFKDEFDASNQEKIIQYHKNGEKYLTSFLKEEEKEKFNLEKMQKIIQKTEEEDWLLPETKNNLFKFYLLTYLLLPYELKGDFLGFVKKHYYDIKNVDFIDENQNNIQVSQTVEKQEDYFYHKIRLFEKNTKKYEIVKYSIVPNEKLKQYFEDLGIDIKYLTGSVESGEKWLGENLGIDIKYLTVEQKSEVSEEKNKKVSLKNNGMFNKTILLFVFKYYQIAFKLFNDIELYSLFFLREKSGKPLEIFRKELESKMKDGYLNFGQLLYVVYEVLVKNKDLDKILSKKIDYRKDKSFSPEIAYLRNFLSHLNYSKFLDNFMKINTNKSDENKEVLIPSIKIQKMIQFIEKCNLQNQIDFDFNFVNDFYMRKEKMFFIQLKQIFPDINSTEKQKMNEKEEILRNRYHLTDKKNEQIKDEHEAQSQLYEKILSLQKIYSSDKNNFYGRLKEEKLLFLEKQGKKKLSMEEIKDKIAGDISDLLGILKKEITRDIKDKLTEKFRYCEEKLLNLSFYNHQDKKKEESIRVFLIRDKNSDNFKFESILDDGSNKIFISKNGKEITIQCCDKVLETLIIEKNTLKISSNGKIISLIPHYSYSIDVKY

SEQ ID NO: 173 - protein, 1111 aa, Fusobacterium necrophorum
MEKFRRQNRNSIIKIIISNYDTKGIKELKVRYRKQAQLDTFIIKTEIVNNDIFIKSIIEKAREKYRYSFLFDGEEKYHFKNKSSVEIVKKDIFSQTPDNMIRNYKITLKISEKNPRVVEAEIEDLMNSTILKDGRRSARREKSVTERKLIEEKVAENYSLLANCPMEEVDSIKIYKIKRFLTYRSNMLLYFASINSFLCEGIKGKENETEEIWHLKDNDVRKEKVKENFKNKLIQSTENYNSSLKNQIEEKEKLLRKESKKGAFYRTIIKKLQQERIKELSEKSLTEDCEKIIKLYSKLRHSLMHYDYQYFENLFENKETPELKDKLDLHLFKSLPLIRKMKLNNKVNYLEDGDTLFVLQKTKKAKTLYQIYDALCEQKNGFNKFINDFFVSDGEENTVFKQIINEKFQSEMEFLGKRISESEEKNPKLKKKFDSMKAHFHNINSEDTKEAYFWDIHSSSNYKTKYNERKNLVNEYTELLGSSKEKKLLREEITQINRKLLKLKQEMEEITKKNSLFRLEYKMKMAFGFLFCEFDGNISRFKDEFDASNQEKIIQYHKNGEKYLTYFLKEEEKEKFNLKKLQETIQKTGKENWLLPQNKNNLFKFYLLTYLLLPYELKGDFLGFVKKHYYDIKNVDFMDENQSSKIIESKEDDFYHKIRLFEKNTKKYEIVKYSIVPDEKLKQYFKDLGIDTKYLILEQKSEVSGEKNKKVSLKNNGMFNKTILLFVFKYYQIAFKLFNDIELYSLFFLREKSGKPFEVFLKELKDKMIGKQLNFGQLLYVIYEVLVKNKDLSEILSERIDYRKDMCFSAEIADLRNFLSHLNYSKFLDNFMKINTNKSDENKEVLIPSIKIQKMIKFIEECNLQSQIDFDFNFVNDFYMRKEKMFFIQLKQIFPDINSTEKQKMNEKEEILRNRYHLTDKKNEQIKDEHEAQSQLYEKILSLQKIYSSDKNNFYGRLKEEKLLFLGKQGKKKLSMEEIKDKIAGDISDLLGILKKEITRDIKDKLTEKFRYCEEKLLNLSFYNHQDKKKEESIRVFLIRDKNSDNFKFESILDDGSNKIFISKNGKEITIQCCDKVLETLMIEKNTLKISSNGKIISLVPHYSYSIDVKY

SEQ ID NO: 174 - protein, 668 aa, Fusobacterium necrophorum; identical to SEQ ID NO: 35

SEQ ID NO: 175 - protein, 1121 aa, Fusobacterium perfoetens; identical to SEQ ID NO: 36

SEQ ID NO: 176 - protein, 897 aa, Fusobacterium ulcerans; identical to SEQ ID NO: 37

SEQ ID NO: 177 - protein, 1158 aa, Fusobacterium varium
MENKNKPNRGSIVRIIISNYDMKGIKELKVRYRKQAQLDTFILQTTLDKSNNSILINDFRVKAREKYRYSFTYDGKEKFSVPSNSIIVTKIDNAAPEKSKEIRKYKITLGIDEKCKTGSMITAAIEDLLEDDRVREGIRNPRRKASKTERKLITESICHNYAQITQCPVEEIDAVKIYKVKRFLSYRSNMLLFFALINDFLCKNLKNEKGEKINEIWEMENKGNNKKIDFDENYNILVAQIKEYFTKEIENYNNRIDNIIDKKELLKYSEEKEESEKNKKLEELNKLESQKLKILTDEEIKADVIKIIKIFSDLRHSLMHYEYKYFENLFENKKNEELAELLNLNLFKNLTLLRQMKIENKTNYLEGDEKFNILGKDVRAKNALGHYDLLVEQKNGFNNFINSFFVQDGTENLEFKKFIDENFIKAQKELEEDIKNCKESVKKLEKKLKENPKKSEDLEKKLEKKQKKLKELKKELEKMKQHYKRLNCAYVWDIHSSTVYKKLYNERKNLIEKYNKQLNGLQDKNAITGINAQLLRIKKEMEEITKSNSLFRLKYKMQIAYAFLEMEYEGNIAKFKNEFDCSKTEKIQEWLEKSEEYLNYCMEKEEDGKNYKFHFKEISEIKDTHNEEWLENTSENNLFKFYILTYLLLPMEFKGDFLGVVKKHYYDIKNVDFTDESEKELSQEQIDKMIGDSFFHKIRLFEKNTKRYEIIKYSILTSDEIKKYFELLELKVPYLEYKGIDEIGIFNKNIILPIFKYYQIIFRLYNDLEIHGLFNVSFDINKILSDLKSYGNENINFREFLYVIKQNNNSSTEEEYQKIWEKLESKYLKEPLLTPEKKEINKKTEKELKKLDGISFLRNKISHLEYEKIIEGVLKTAVNGENKKTSETNADKVFLNEKIKKIINFIKENELDKIELGFNFINDFFMKKEQFMFGQIKQVKEGNSDSITTERKRKEENNKRLKITYGLNYNNLSKIYEFSNTLREIVNSPLFLKDSTLLKKVDLSKVMLKEKPICSLQYENNTKLEDDIKRILLKDSSDIMGIYKAEVVKKLKEKLVLIFKYDEEKKIYVTVYDTSKAVPENISKEILVKRNNSKEEYFFEDNKKKYTTQYYTLEITKENELKVIPAKKLEGKEFKTEKKEENKLMLNNHYCFNVKIIY

SEQ ID NO: 178 - protein, 796 aa, Tissierella sp.
MEKDKKGEKIDISQEMIEEDLRKILILFSRLRHSMVHYDYEFYQALYSGKDFVISDKNNLENRMISQLLDLNIFKELSKVKLIKDKAISNYLDKNTTIHVLGQDIKAIRLLDIYRDICGSKNGFNKFINTMITISGEEDREYKEKVIEHFNKKMENLSTYLEKLEKQDNAKRNNKRVYNLLKQKLIEQQKLKEWFGGPYVYDIHSSKRYKELYIERKKLVDRHSKLFEEGLDEKNKKELTKINDELSKLNSEMKEMTKLNSKYRLQYKLQLAFGFILEEFDLNIDTFINNFDKDKDLIISNFMKKRDIYLNRVLDRGDNRLKNIIKEYKFRDTEDIFCNDRDNNLVKLYILMYILLPVEIRGDFLGFVKKNYYDMKHVDFIDKKDKEDKDTFFHDLRLFEKNIRKLEITDYSLSSGFLSKEHKVDIEKKINDFINRNGAMKLPEDITIEEFNKSLILPIMKNYQINFKLLNDIEISALFKIAKDRSITFKQAIDEIKNEDIKKNSKKNDKNNHKDKNINFTQLMKRALHEKIPYKAGMYQIRNNISHIDMEQLYIDPLNSYMNSNKNNITISEQIEKIIDVCVTGGVTGKELNNNIINDYYMKKEKLVFNLKLRKQNDIVSIESQEKNKREEFVFKKYGLDYKDGEINIIEVIQKVNSLQEELRNIKETSKEKLKNKETLFRDISLINGTIRKNINFKIKEMVLDIVRMDEIRHINIHIYYKGENYTRSNIIKFKYAIDGENKKYYLKQHEINDINLELKDKFVTLICNMDKHPNKNKQTINLESNYIQNVKFIIP

1. A method of modifying a target locus of interest, the method comprising delivering to the target locus of interest a non-naturally occurring or engineered composition comprising a Cas13c effector protein and one or more nucleic acid components, wherein the Cas13c effector protein forms a complex with the one or more nucleic acid components, the one or more nucleic acid components directs the complex to the target locus of interest and the complex binds to the target locus of interest.

2. The method of claim 1, wherein the target locus of interest comprises RNA.

3. The method of claim 1, wherein the modification of the target locus of interest comprises a nucleotide strand break.

4. The method of claim 1, wherein the Cas13c effector protein:
is codon optimized for expression in a eukaryotic cell;
is associated with one or more functional domains; and optionally the Cas13c effector protein contains one or more mutations optionally within an HEPN domain; or
comprises one or more nuclear localization signals.

5. (canceled)

6. The method of claim 4, wherein the functional domain modifies transcription or translation of the target locus.

7. (canceled)

8. The method of claim 1, wherein the target locus of interest is provided via a nucleic acid molecule in vitro or a nucleic acid molecule within a cell.

9. (canceled)

10. The method of claim 8, wherein the cell comprises a prokaryotic cell, a eukaryotic cell or a mammalian cell.

11. (canceled)

12. The method of claim 1, wherein when in complex with the Cas13c effector protein the nucleic acid component(s) is capable of effecting sequence specific binding of the complex to a target sequence of the target locus of interest.

13. The method of claim 1, wherein the nucleic acid component(s) comprise a dual direct repeat sequence.

14. The method of claim 1, wherein the effector protein and nucleic acid component(s) are provided via one or more polynucleotide molecules encoding the polypeptides and/or the nucleic acid component(s), and wherein the one or more polynucleotide molecules are operably configured to express the polypeptides and/or the nucleic acid component(s).

15. The method of claim 14, wherein the one or more polynucleotide molecules:
comprises one or more regulatory elements operably configured to express the polypeptides and/or the nucleic acid component(s), optionally wherein the one or more regulatory elements comprise a promoter(s) or inducible promotor(s);
is comprised within one or more vectors;
is comprised within one vector;
is comprised within one or more viral vectors; or
is comprised within one or more viral vectors comprising one or more retroviral, lentiviral, adenoviral, adeno-associated or herpes simplex viral vectors.

16. (canceled)

17. (canceled)

18. (canceled)

19. (canceled)

20. (canceled)

21. The method of claim 1, wherein the non-naturally occurring or engineered composition is delivered via a delivery vehicle comprising liposome(s), particle(s), exosome(s), microvesicle(s), a gene-gun or one or more viral vector(s).

22. (canceled)

23. A non-naturally occurring or engineered composition comprising a Cas13c effector protein and one or more nucleic acid components, wherein the effector protein forms a complex with the one or more nucleic acid components, the one or more nucleic acid components directs the complex to the target of interest and the complex binds to the target locus of interest.

24. The composition of claim 23, wherein the target locus of interest comprises RNA.

25. The composition of claim 23, wherein the modification of the target locus of interest comprises a nucleotide strand break.

26. The composition of claim 23, wherein the Cas13c effector protein:
is codon optimized for expression in a eukaryotic cell;
is associated with one or more functional domains; and optionally the effector protein contains one or more mutations optionally within an HEPN domain, such as R597A, H602A, R1278A, and/or H1283A, whereby the complex can deliver an epigenetic modifier or a transcriptional or translational activation or repression signal; or comprises one or more nuclear localization signals.

27. (canceled)

28. The composition of claim 26, wherein the functional domain modifies transcription or translation of the target locus.

29. (canceled)

30. The composition of claim 23, wherein the target locus of interest is comprised in a nucleic acid molecule in vitro or a nucleic acid molecule within a cell.

31. (canceled)

32. The composition of claim 30, wherein the cell comprises a prokaryotic cell, a eukaryotic cell, or a mammalian cell.

33. (canceled)

34. The composition of claim 23, wherein when in complex with the effector protein the nucleic acid component(s) is capable of effecting sequence specific binding of the complex to a target sequence of the target locus of interest.

35. The composition of claim 23, wherein the nucleic acid component(s) comprise a dual direct repeat sequence.

36. The composition of claim 23, wherein the effector protein and nucleic acid component(s) are provided via one or more polynucleotide molecules encoding the polypeptides and/or the nucleic acid component(s), and wherein the one or more polynucleotide molecules are operably configured to express the polypeptides and/or the nucleic acid component(s).

37. The composition of claim 36, wherein the one or more polynucleotide molecules:
comprises one or more regulatory elements operably configured to express the polypeptides and/or the nucleic acid component(s), optionally wherein the one or more regulatory elements comprise a promoter(s) or inducible promotor(s);
is comprised within one or more vectors;
is comprised within one vector;
is comprised within one or more viral vectors; or
is comprised within one or more viral vectors comprising one or more retroviral, lentiviral, adenoviral, adeno-associated or herpes simplex viral vectors.

38. (canceled)

39. (canceled)

40. (canceled)

41. (canceled)

42. (canceled)

43. The composition of claim 23, wherein the non-naturally occurring or engineered composition is delivered via a delivery vehicle comprising liposome(s), particle(s), exosome(s), microvesicle(s), a gene-gun or one or more viral vector(s).

44. A vector system comprising one or more vectors, the one or more vectors comprising one or more polynucleotide molecules encoding components of the composition of claim 23.

45. A delivery system configured to deliver a Cas13c effector protein and one or more nucleic acid components of the composition of claim 23.

46. (canceled)

47. (canceled)

48. A cell engineered to comprise or express, optionally inducibly or constituently, the composition of claim 23 or a component thereof, or a cell line comprising the cell or progeny thereof.

49. The cell according to claim 48, wherein the modification results in:
the cell comprising altered transcription or translation of at least one RNA product;
the cell comprising altered transcription or translation of at least one RNA product, wherein the expression of the at least one product is increased; or
the cell comprising altered transcription or translation of at least one RNA product, wherein the expression of the at least one product is decreased.

50. (canceled)

51. (canceled)

52. (canceled)

53. (canceled)

54. (canceled)

55. A multicellular organism, a plant, or an animal comprising one or more cells of claim 48.

56. (canceled)

57. A product from a cell, or cell line or the organism of claim or the plant or animal model; said cell or cell(s) of the cell line or organism or plant or animal model inducibly or constituently expressing the one or more components of the composition of claim 23.

58. The product of claim 57, wherein the amount of product is greater than or less than the amount of product from a cell that has not had alteration or modification.

59. The product of claim 57, wherein the product is altered in comparison with the product from a cell that has not had alteration or modification.

60. An assay for performing a screening method or mutagenesis method, the assay comprising the composition of claim 23 or cells comprising the composition.

61. (canceled)

62. The method of claim 60 wherein the assay is an RNAi or Fluorescence in situ hybridization assay.

63. (canceled)

64. The method of claim 1, wherein said method results in:
RNA sequence specific interference,
RNA sequence specific gene regulation,
screening of RNA or RNA products or lincRNA or non-coding RNA, or nuclear RNA, or mRNA,
mutagenesis,
Fluorescence in situ hybridization,
breeding,
in vitro or in vivo induction of cell dormancy,
in vitro or in vivo induction of cell cycle arrest,
in vitro or in vivo reduction of cell growth and/or cell proliferation,
in vitro or in vivo induction of cell anergy,
in vitro or in vivo induction of cell apoptosis,
in vitro or in vivo induction of cell necrosis,
in vitro or in vivo induction of cell death, or
in vitro or in vivo induction of programmed cell death.

65. (canceled)

66. An engineered, non-naturally occurring CRISPR-Cas system comprising one or more vectors comprising:
a) a first regulatory element operable in a eukaryotic or prokaryotic cell operably linked to at least one nucleotide sequence encoding a CRISPR-Cas system guide RNA that hybridizes with a target sequence of an RNA molecule encoded by a DNA molecule in a eukaryotic or prokaryotic cell, wherein the DNA molecule encodes and the eukaryotic or prokaryotic cell expresses at least one gene product, and
b) a second regulatory element operable in a eukaryotic or prokaryotic cell operably linked to a nucleotide sequence encoding the Cas13c effector protein of claim 23, wherein components (a) and (b) are located on same or different vectors of the system,
whereby the guide RNA targets and hybridizes with the target sequence and the Cas13c effector protein cleaves the RNA molecule,
whereby expression of the at least one gene product is altered; and, wherein the Cas13c effector protein and the guide RNA do not naturally occur together.

67. An engineered, non-naturally occurring composition comprising a CRISPR-Cas system, said system comprising the Cas13c effector protein of claim 23 and guide RNA (gRNA);
wherein the gRNA comprises a dead guide sequence;
whereby the gRNA is capable of hybridizing to a target sequence;
whereby the CRISPR-Cas system is directed to the target sequence with reduced indel activity resultant from nuclease activity of a non-mutant Cas13c effector protein of the system.

68. A method of inhibiting cell growth, the method comprising delivering to the cell a non-naturally occurring or engineered composition comprising the Cas13c effector protein of claim 23 and guide RNA (gRNA);
whereby the gRNA is capable of hybridizing to a target RNA sequence of the cell;
whereby the CRISPR-Cas system is directed to the target RNA sequence with reduced indel activity resultant from nuclease activity of a non-mutant Cas13c effector protein of the system.

69. A CRISPR associated Cas vector system comprising one or more vectors comprising:
a) a first regulatory element operable in a eukaryotic or prokaryotic cell operably linked to at least one nucleotide sequence encoding a CRISPR-Cas system guide RNA that hybridizes with a target sequence of an RNA molecule encoded by a DNA molecule in a eukaryotic or prokaryotic cell, wherein the DNA molecule encodes and the eukaryotic or prokaryotic cell expresses at least one gene product, and
b) a second regulatory element operable in a eukaryotic or prokaryotic cell operably linked to a nucleotide sequence encoding the Cas13c effector protein of claim 23, wherein components (a) and (b) are located on same or different vectors of the system,
whereby the guide RNA targets and hybridizes with the target sequence and the Cas13c effector protein cleaves the RNA molecule,
whereby expression of the at least one gene product is altered; and, wherein the Cas13c effector protein and the guide RNA do not naturally occur together.
